(19) United States
(12) Patent Application Publication
(10) Pub. No.: US 2002/0094954 A1
(43) Pub. Date: Jul. 18, 2002

(54) Human schizophrenia gene

(75) Inventors: Hreinn Stefansson, Krokamyri (IS); Valgerdur Steinthorsdottir, Silfurteigur (IS); Jeffrey R. Gulcher, Chicago, IL (US)

Correspondence Address: HAMILTON, BROOK, SMITH & REYNOLDS, P.C., 530 VIRGINIA ROAD, P.O. BOX 9133, CONCORD, MA, 01742-9133, US

(73) Assignee: deCODE genetics, ehf,

(21) Appl. No.: 09/795,686

(22) Filed: Feb. 28, 2001

Related U.S. Application Data
(63) Continuation-in-part of application No. 09/515,715, filed on Feb. 28, 2000.

(51) Int. Cl. A61K 38/17; C12Q 1/68; C07H 21/04; C12N 9/00; C12P 21/02; C12N 5/06

(52) U.S. Cl. 514/12; 435/6; 435/183; 435/69.1; 435/325; 435/320.1; 536/23.2

(57) ABSTRACT

Nucleic acids comprising the neuregulin-1-associated gene 1 (NRG1AG1) and encoding NRG1AG1 polypeptides are disclosed. Also described are related nucleic acids encoding NRG1AG1 polypeptides; NRG1AG1 polypeptides; antibodies that bind to NRG1AG1 polypeptides; methods of diagnosis of susceptibility to schizophrenia; assays for agents that alter the activity of NRG1AG1 polypeptide or which identify NRG1AG1 binding agents, and the agents or binding agents identified by the assays; NRG1AG1 therapeutic agents, including the NRG1AG1 nucleic acids, NRG1AG1 polypeptides, or agents that alter the activity of an NRG1AG1 polypeptides; pharmaceutical compositions comprising the NRG1AG1 therapeutic agents; as well as methods of therapy of schizophrenia.

### RELATED APPLICATION

[0001] This application is a continuation-in-part of U.S. application Ser. No. 09/515,715, filed Feb. 28, 2000. The entire teachings of the above application is incorporated herein by reference.

### BACKGROUND OF THE INVENTION

[0002] Schizophrenia is a devastating form of psychopathology, with a lifetime prevalence worldwide of 0.5%-1%. Twin and adoption studies suggest that both genetic and environmental factors influence susceptibility (see, e.g., Tsuang, M. T. et aL, Schizophr. Res. 4(2):157-71 (1991); Tienari, P. J. and Wynne, L. C., Ann. Med. 26(4):233-7 (1994); Franzek, E. and Beckmann, H., Am. J. Psychiatry 155(1):76-83 (1998); Tsuang, M. T., J. Biomed. Sci. 5(1):28-30 (1998)). Among first-degree relatives, the risk has been reported to vary from 6% in parents, to 10% in siblings, and to 13% in children of schizophrenic individuals; if one of the parents is also schizophrenic, the risk to siblings increases to 17%, and children of two schizophrenics have a risk of 46% of developing the illness (McGue, M. and Gottesmann, I. I., Eur. Arch. Psychiatry Clin. Neurosci 240:174-181 (1991); see also, e.g., Lim, L. C. and Sim, L. P., Singapore Med. J. 33(6):645-7 (1992)). The mode of transmission, however, remains uncertain.

[0003] Reports of suggestive linkage to several loci have been published, including loci on chromosomes 3, 5, 6, 8, 10, 13, 20, 22 and the X chromosome (see, e.g., for chromosomes 3p and 8p, Pulver, A. E., et al., Am. J. Med. Genet. 60(4):252-60 (1995); for chromosomes 5q, 6p and 8p, Kendler, K. S. et al., Am. J. Med. Genet. 88(1):29-33 (1999); for chromosomes 5q, 6p, 8p, 20p and 22q, Hovatta, I. et al., Mol. Psychiatry 3(5):452-7 (1998); for chromosome 6p, Schwab, S. G. et al., Nat. Genet. 11(3):325-7 (1995), Brzustowicz, L. M. et al., Am. J. Hum. Genet. 61(6):1388-96 (1997) and Cao, Q. et al., Genomics 43(1):1-8 (1997); for chromosomes 6 and 8, Straub, R. E. et al., Cold Spring Harbor Symp. Quant. Biol 61I:823-33 (1996); for chromosome 8, Kendler, KS. et al., Am. J. Psychiatry 153(12):1534-40 (1996); for chromosome 10, Straub, R. E. et al., Am. J. Med. Genet. 81(4):296-301 (1998) and Schwab, S. G. et al., Am. J. Med. Genet. 81(4):302-307 (1998); for chromosome 13, Lin, M. W. et al., Psyciatr. Genet. 5(3):117-26 (1995); Lin, M. W. et al., Hum. Genet. 99(3):417-420 (1997) and Blouin, J. L. et al., Nat. Genet. 20(1):70-73 (1993) (8and 13); for chromosome 22, Gill, M. et al., Am. J. Med. Genet. 67(1):40-45 (1996) and Bassett, A. S. et al., Am. J. Med. Genet. 81(4):328-37 (1998); and for the X chromosome, Milunsky, J. et al., Clin. Genet. 55(6):455-60 (1999)).

### SUMMARY OF THE INVENTION

[0004] The present invention relates to isolated nucleic acid molecules comprising the neuregulin-1-associated gene 1 (NRG1AG1). In one embodiment, the isolated nucleic acid molecule comprises a nucleotide sequence selected from the group consisting of SEQ ID NO: 1 and the complement of SEQ ID NO: 1. The invention further relates to a nucleic acid molecule which hybridizes under high stringency conditions to a nucleotide sequence selected from the group consisting of SEQ ID NO: 1 and the complement of SEQ ID NO: 1. The invention additionally relates to isolated nucleic acid molecules (e.g., cDNA molecules) encoding an NRG1AG1 polypeptide (e.g., encoding SEQ ID NO: 6, 7, 8 or 9, or another splicing variant of NRG1AG1 polypeptide).

[0005] The invention further provides a method for assaying a sample for the presence of a nucleic acid molecule comprising all or a portion of NRG1AG1 in a sample, comprising contacting said sample with a second nucleic acid molecule comprising a nucleotide sequence encoding an NRG1AG1 polypeptide (e.g., SEQ ID NO: 1 or the complement of SEQ ID NO: 1; a nucleotide sequence encoding SEQ ID NO: 6, 7, 8, or 9, or another splicing variant of NRG1AG1 polypeptide), or a fragment or derivative thereof, under conditions appropriate for selective hybridization. The invention additionally provides a method for assaying a sample for the level of expression of an NRG1AG1 polypeptide, or fragment or derivative thereof, comprising detecting (directly or indirectly) the level of expression of the NRG1AG1 polypeptide, fragment or derivative thereof.

[0006] The invention also relates to a vector comprising an isolated nucleic acid molecule of the invention operatively linked to a regulatory sequence, as well as to a recombinant host cell comprising the vector. The invention also provides a method for preparing a polypeptide encoded by an isolated nucleic acid molecule described herein (an NRG1AG1 polypeptide), comprising culturing a recombinant host cell of the invention under conditions suitable for expression of said nucleic acid molecule.

[0007] The invention further provides an isolated polypeptide encoded by isolated nucleic acid molecules of the invention (e.g., NRG1AG1 polypeptide), as well as fragments or derivatives thereof. In a particular embodiment, the polypeptide comprises the amino acid sequence of SEQ ID NO: 6, SEQ ID NO: 7, SEQ ID NO: 8 or SEQ ID NO: 9. In another embodiment, the polypeptide is another splicing variant of an NRG1AG1 polypeptide. The invention also relates to an isolated polypeptide comprising an amino acid sequence which is greater than about 90 percent identical to the amino acid sequence of SEQ ID NO: 6, SEQ ID NO: 7, SEQ ID NO: 8 or SEQ ID NO: 9.

[0008] The invention also relates to an antibody, or an antigen-binding fragment thereof, which selectively binds to a polypeptide of the invention, as well as to a method for assaying the presence of a polypeptide encoded by an isolated nucleic acid molecule of the invention in a sample, comprising contacting said sample with an antibody which specifically binds to the encoded polypeptide.

[0009] The invention further relates to methods of diagnosing a predisposition to schizophrenia. The methods of diagnosing a predisposition to schizophrenia in an individual include detecting the presence of a mutation in NRG1AG1, as well as detecting alterations in expression of an NRG1AG1 polypeptide, such as the presence of different splicing variants of NRG1AG1 polypeptides. The alterations in expression can be quantitative, qualitative, or both quantitative and qualitative.

[0010] The invention additionally relates to an assay for identifying agents which alter (e.g., enhance or inhibit) the activity or expression of one or more NRG1AG1 polypeptides. For example, a cell, cellular fraction, or solution containing an NRG1AG1 polypeptide or a fragment or derivative thereof, can be contacted with an agent to be tested, and the level of NRG1AG1 polypeptide expression or activity can be assessed. The activity or expression of more than one NRG1AG1 polypeptides can be assessed concurrently (e.g., the cell, cellular fraction, or solution can contain more than one type of NRG1AG1 polypeptide, such as different splicing variants, and the levels of the different polypeptides or splicing variants can be assessed).

[0011] In another embodiment, the invention relates to assays to identify polypeptides which interact with one or more NRG1AG1 polypeptides. In a yeast two-hybrid system, for example, a first vector is used which includes a nucleic acid encoding a DNA binding domain and also an NRG1AG1 polypeptide, splicing variant, or fragment or derivative thereof, and a second vector is used which includes a nucleic acid encoding a transcription activation domain and also a nucleic acid encoding a polypeptide which potentially may interact with the NRG1AG1 polypeptide, splicing variant, or fragment or derivative thereof (e.g., a NRG1AG1 polypeptide binding agent or receptor). Incubation of yeast containing both the first vector and the second vector under appropriate conditions allows identification of polypeptides which interact with the NRG1AG1 polypeptide or fragment or derivative thereof, and thus can be agents which alter the activity of expression of an NRG1AG1 polypeptide.

[0012] Agents that enhance or inhibit NRG1AG1 polypeptide expression or activity are also included in the current invention, as are methods of altering (enhancing or inhibiting) NRG1AG1 polypeptide expression or activity by contacting a cell containing NRG1AG1 and/or polypeptide, or by contacting the NRG1AG1 polypeptide, with an agent that enhances or inhibits expression or activity of NRG1AG1 or polypeptide.

[0013] Additionally, the invention pertains to pharmaceutical compositions comprising the nucleic acids of the invention, the polypeptides of the invention, and/or the agents that alter activity of NRG1AG1 polypeptide. The invention further pertains to methods of treating schizophrenia, by administering NRG1AG1 therapeutic agents, such as nucleic acids of the invention, polypeptides of the invention, the agents that alter activity of NRG1AG1 polypeptide, or compositions comprising the nucleic acids, polypeptides, and/or the agents that alter activity of NRG1AG1 polypeptide.

### BRIEF DESCRIPTION OF THE DRAWINGS

[0014] FIG. 1 is a graphic representation of the nonparametric multipoint LOD score for the schizophrenia locus on 8p21-11.

[0015] FIG. 2 depicts haplotypes found in individuals affected with schizophrenia. Portions which are found in multiple haplotypes are depicted by backward slashes.

[0016] FIG. 3 depicts the order of sequenced BACS and boundaries for at-risk haplotypes for schizophrenia at locus 8p12.

[0017] FIG. 4 depicts the exons, single nucleotide polymorphisms (SNPs), and exons of neuregulin 1-associated gene 1 at locus 8p12. Cylinders, screened for mutations; N, new exons; open stars, SNPs (coding); filled stars, SNPs (untranslated); open circles, 5′ exons; filled circles, 3′ exons; lines, genomic neighbors.

### DETAILED DESCRIPTION OF THE INVENTION

[0018] As described herein, Applicants have used linkage and haplotype analyses to identify a disease susceptibility gene for schizophrenia residing in a 1.5 Mb segment on chromosome 8p12. The gene is neuregulin-1-associated gene 1 (NRG1AG1). The full sequence of the neuregulin 1-associated gene 1 is shown in Appendix I. Microsatellite markers and single nucleotide polymorphisms (SNPs) in the sequence are shown in Appendix II. Appendix III shows the splice variants for neuregulin 1-associated gene 1 exons.

### NUCLEIC ACIDS OF THE INVENTION

[0019] Accordingly, the invention pertains to an isolated nucleic acid molecule comprising the mammalian (e.g., primate or human) neuregulin-1-associated gene 1 (NRG1AG1). The term, “NRG1AG1,” as used herein, refers to an isolated nucleic acid molecule in the 8p21-11 locus, which is associated with a susceptibility to schizophrenia, and also to an isolated nucleic acid molecule (e.g., cDNA or the gene) that encodes an NRG1AG1 polypeptide (e.g., the polypeptide having SEQ ID NO: 6, 7, 8 or 9, as shown in Appendix I, or another splicing variant of an NRG1AG1 polypeptide). In a preferred embodiment, the isolated nucleic acid molecule comprises SEQ ID NO: 1 (shown in Appendix I) or the complement of SEQ ID NO: 1. In another preferred embodiment, the isolate nucleic acid molecule comprises the sequence of SEQ ID NO: 1 or the complement of SEQ ID NO: 1, except that one or more single nucleotide polymorphisms as shown in Appendix II are also present.

[0020] The isolated nucleic acid molecules of the present invention can be RNA, for example, mRNA, or DNA, such as cDNA and genomic DNA. A “neuregulin 1-associated gene 1 nucleic acid” (“NRG1AG1-nucleic acid”), as used herein, refers to a nucleic acid molecule (RNA, mRNA, cDNA, or genomic DNA, either single- or double-stranded) encoding NRG1AG1. DNA molecules can be double-stranded or single-stranded; single stranded RNA or DNA can be either the coding, or sense, strand or the non-coding, or antisense, strand. The nucleic acid molecule can include all or a portion of the coding sequence of the gene and can further comprise additional non-coding sequences such as introns and non-coding 3′ and 5′ sequences (including regulatory sequences, for example). Additionally, the nucleic acid molecule can be fused to a marker sequence, for example, a sequence that encodes a polypeptide to assist in isolation or purification of the polypeptide. Such sequences include, but are not limited to, those which encode a glutathione-S-transferase (GST) fusion protein and those which encode a hemagglutinin A (HA) polypeptide marker from influenza.

[0021] An “isolated” nucleic acid molecule, as used herein, is one that is separated from nucleic acids which normally flank the gene or nucleotide sequence (as in genomic sequences) and/or has been completely or partially purified from other transcribed sequences (e.g., as in an RNA library). For example, an isolated nucleic acid of the invention may be substantially isolated with respect to the complex cellular milieu in which it naturally occurs, or culture medium when produced by recombinant techniques, or chemical precursors or other chemicals when chemically synthesized. In some instances, the isolated material will form part of a composition (for example, a crude extract containing other substances), buffer system or reagent mix. In other circumstances, the material may be purified to essential homogeneity, for example as determined by PAGE or column chromatography such as HPLC. Preferably, an isolated nucleic acid molecule comprises at least about 50, 80 or 90% (on a molar basis) of all macromolecular species present. With regard to genomic DNA, the term “isolated” also can refer to nucleic acid molecules which are separated from the chromosome with which the genomic DNA is naturally associated. For example, the isolated nucleic acid molecule can contain less than about 5 kb, 4 kb, 3 kb, 2 kb, 1 kb, 0.5 kb or 0.1 kb of nucleotides which flank the nucleic acid molecule in the genomic DNA of the cell from which the nucleic acid molecule is derived.

[0022] The nucleic acid molecule can be fused to other coding or regulatory sequences and still be considered isolated. Thus, recombinant DNA contained in a vector is included in the definition of “isolated” as used herein. Also, isolated nucleic acid molecules include recombinant DNA molecules in heterologous host cells, as well as partially or substantially purified DNA molecules in solution. “Isolated” nucleic acid molecules also encompass in vivo and in vitro RNA transcripts of the DNA molecules of the present invention. An isolated nucleic acid molecule or nucleotide sequence can include a nucleic acid molecule or nucleotide sequence which is synthesized chemically or by recombinant means. Therefore, recombinant DNA contained in a vector are included in the definition of “isolated” as used herein. Also, isolated nucleotide sequences include recombinant DNA molecules in heterologous organisms, as well as partially or substantially purified DNA molecules in solution. In vivo and in vitro RNA transcripts of the DNA molecules of the present invention are also encompassed by “isolated” nucleotide sequences. Such isolated nucleotide sequences are useful in the manufacture of the encoded polypeptide, as probes for isolating homologous sequences (e.g., from other mammalian species), for gene mapping (e.g., by in situ hybridization with chromosomes), or for detecting expression of the gene in tissue (e.g., human tissue), such as by Northern blot analysis

[0023] The present invention also pertains to variant nucleic acid molecules which are not necessarily found in nature but which encode an NRG1AG1 polypeptide (e.g., a polypeptide having the amino acid sequence of SEQ ID NO: 6, 7, 8, or 9, or another splicing variant of NRG1AG1 polypeptide). Thus, for example, DNA molecules which comprise a sequence that is different from the naturally-occurring nucleotide sequence but which, due to the degeneracy of the genetic code, encode an NRG1AG1 polypeptide of the present invention are also the subject of this invention. The invention also encompasses nucleotide sequences encoding portions (fragments), or encoding variant polypeptides such as analogues or derivatives of the NRG1AG1 polypeptide. Such variants can be naturally-occurring, such as in the case of allelic variation or single nucleotide polymorphisms, or non-naturally-occurring, such as those induced by various mutagens and mutagenic processes. Intended variations include, but are not limited to, addition, deletion and substitution of one or more nucleotides which can result in conservative or non-conservative amino acid changes, including additions and deletions. Preferably the nucleotide (and/or resultant amino acid) changes are silent or conserved; that is, they do not alter the characteristics or activity of the NRG1AG1 polypeptide. In one preferred embodiment, the nucleotide sequences are fragments that comprise one or more polymorphic microsatellite markers (e.g., as shown in Appendix II). In another preferred embodiment, the nucleotide sequences are fragments that comprise one or more single nucleotide polymorphisms in the NRG1AG1 gene (e.g., as shown in Appendix II).

[0024] Other alterations of the nucleic acid molecules of the invention can include, for example, labelling, methylation, internucleotide modifications such as uncharged linkages (e.g., methyl phosphonates, phosphotriesters, phosphoamidates, carbamates), charged linkages (e.g., phosphorothioates, phosphorodithioates), pendent moieties (e.g., polypeptides), intercalators (e.g., acridine, psoralen), chelators, alkylators, and modified linkages (e.g., alpha anomeric nucleic acids). Also included are synthetic molecules that mimic nucleic acid molecules in the ability to bind to a designated sequences via hydrogen bonding and other chemical interactions. Such molecules include, for example, those in which peptide linkages substitute for phosphate linkages in the backbone of the molecule.

[0025] The invention also pertains to nucleic acid molecules which hybridize under high stringency hybridization conditions, such as for selective hybridization, to a nucleotide sequence described herein (e.g., nucleic acid molecules which specifically hybridize to a nucleotide sequence encoding polypeptides described herein, and, optionally, have an activity of the polypeptide). In one embodiment, the invention includes variants described herein which hybridize under high stringency hybridization conditions (e.g., for selective hybridization) to a nucleotide sequence comprising a nucleotide sequence selected from SEQ ID NO: 1 or the complement of SEQ ID NO: 1. In another embodiment, the invention includes variants described herein which hybridize under high stringency hybridization conditions (e.g., for selective hybridization) to a nucleotide sequence encoding an amino acid sequence selected from SEQ ID NO: 6, 7, 8, or 9. In a preferred embodiment, the variant which hybridizes under high stringency hybridizations has an activity of NRG1AG1 (e.g., binding activity).

[0026] Such nucleic acid molecules can be detected and/or isolated by specific hybridization (e.g., under high stringency conditions). “Specific hybridization,” as used herein, refers to the ability of a first nucleic acid to hybridize to a second nucleic acid in a manner such that the first nucleic acid does not hybridize to any nucleic acid other than to the second nucleic acid (e.g., when the first nucleic acid has a higher similarity to the second nucleic acid than to any other nucleic acid in a sample wherein the hybridization is to be performed). “Stringency conditions” for hybridization is a term of art which refers to the incubation and wash conditions, e.g., conditions of temperature and buffer concentration, which permit hybridization of a particular nucleic acid to a second nucleic acid; the first nucleic acid may be perfectly (i.e., 100%) complementary to the second, or the first and second may share some degree of complementarity which is less than perfect (e.g., 70%, 75%, 85%, 95%). For example, certain high stringency conditions can be used which distinguish perfectly complementary nucleic acids from those of less complementarity. “High stringency conditions”, “moderate stringency conditions” and “low stringency conditions” for nucleic acid hybridizations are explained on pages 2.10.1-2.10.16 and pages 6.3.1-6.3.6 in Current Protocols in Molecular Biology (Ausubel, F. M. et al., “Current Protocols in Molecular Biology”, John Wiley & Sons, (1998), the entire teachings of which are incorporated by reference herein). The exact conditions which determine the stringency of hybridization depend not only on ionic strength (e.g., 0.2XSSC, 0.1XSSC), temperature (e.g., room temperature, 42° C., 68° C.) and the concentration of destabilizing agents such as formamide or denaturing agents such as SDS, but also on factors such as the length of the nucleic acid sequence, base composition, percent mismatch between hybridizing sequences and the frequency of occurrence of subsets of that sequence within other non-identical sequences. Thus, equivalent conditions can be determined by varying one or more of these parameters while maintaining a similar degree of identity or similarity between the two nucleic acid molecules. Typically, conditions are used such that sequences at least about 60%, at least about 70%, at least about 80%, at least about 90% or at least about 95% or more identical to each other remain hybridized to one another. By varying hybridization conditions from a level of stringency at which no hybridization occurs to a level at which hybridization is first observed, conditions which will allow a given sequence to hybridize (e.g., selectively) with the most similar sequences in the sample can be determined.

[0027] Exemplary conditions are described in Krause, M. H. and S. A. Aaronson, Methods in Enzymology, 200:546-556 (1991). Also, in, Ausubel, et al., “Current Protocols in Molecular Biology”, John Wiley & Sons, (1998), which describes the determination of washing conditions for moderate or low stringency conditions. Washing is the step in which conditions are usually set so as to determine a minimum level of complementarity of the hybrids. Generally, starting from the lowest temperature at which only homologous hybridization occurs, each ° C. by which the final wash temperature is reduced (holding SSC concentration constant) allows an increase by 1% in the maximum extent of mismatching among the sequences that hybridize. Generally, doubling the concentration of SSC results in an increase in Tₘ of ˜17° C. Using these guidelines, the washing temperature can be determined empirically for high, moderate or low stringency, depending on the level of mismatch sought.

[0028] For example, a low stringency wash can comprise washing in a solution containing 0.2XSSC/0.1% SDS for 10 min at room temperature; a moderate stringency wash can comprise washing in a prewarmed solution (42° C.) solution containing 0.2XSSC/0. 1% SDS for 15 min at 42° C.; and a high stringency wash can comprise washing in prewarmed (68° C.) solution containing O.1XSSC/0.1% SDS for 15 min at 68° C. Furthermore, washes can be performed repeatedly or sequentially to obtain a desired result as known in the art. Equivalent conditions can be determined by varying one or more of the parameters given as an example, as known in the art, while maintaining a similar degree of identity or similarity between the target nucleic acid molecule and the primer or probe used.

[0029] The percent identity of two nucleotide or amino acid sequences can be determined by aligning the sequences for optimal comparison purposes (e.g., gaps can be introduced in the sequence of a first sequence). The nucleotides or amino acids at corresponding positions are then compared, and the percent identity between the two sequences is a function of the number of identical positions shared by the sequences (i.e., % identity=# of identical positions/total # of positions×100). In certain embodiments, the length of a sequence aligned for comparison purposes is at least 30%, preferably at least 40%, more preferably at least 60%, and even more preferably at least 70%, 80% or 90% of the length of the reference sequence. The actual comparison of the two sequences can be accomplished by well-known methods, for example, using a mathematical algorithm. A preferred, non-limiting example of such a mathematical algorithm is described in Karlin et al., Proc. Natl. Acad. Sci. USA, 90:5873-5877 (1993). Such an algorithm is incorporated into the NBLAST and XBLAST programs (version 2.0) as described in Altschul et al., Nucleic Acids Res., 25:389-3402 (1997). When utilizing BLAST and Gapped BLAST programs, the default parameters of the respective programs (e.g., NBLAST) can be used. See http://www.ncbi.nlm.nih.gov. In one embodiment, parameters for sequence comparison can be set at score=100, wordlength=12, or can be varied (e.g., W=5 or W=20).

[0030] Another preferred, non-limiting example of a mathematical algorithm utilized for the comparison of sequences is the algorithm of Myers and Miller, CABIOS (1989). Such an algorithm is incorporated into the ALIGN program (version 2.0) which is part of the CGC sequence alignment software package. When utilizing the ALIGN program for comparing amino acid sequences, a PAM120 weight residue table, a gap length penalty of 12, and a gap penalty of 4 can be used. Additional algorithms for sequence analysis are known in the art and include ADVANCE and ADAM as described in Torellis and Robotti (1994) Comput. Appl. Biosci., 10:3-5; and FASTA described in Pearson and Lipman (1988) PNAS, 85:2444-8.

[0031] In another embodiment, the percent identity between two amino acid sequences can be accomplished using the GAP program in the CGC software package (available at http://www.cgc.com) using either a Blossom 63 matrix or a PAM250 matrix, and a gap weight of 12, 10, 8, 6, or 4 and a length weight of 2, 3, or 4. In yet another embodiment, the percent identity between two nucleic acid sequences can be accomplished using the GAP program in the CGC software package (available at http://www.cgc.com), using a gap weight of 50 and a length weight of 3.

[0032] The present invention also provides isolated nucleic acid molecules that contain a fragment or portion that hybridizes under highly stringent conditions to a nucleotide sequence comprising a nucleotide sequence selected from SEQ ID NO: 1 and the complement of SEQ ID NO: 1, and also provides isolated nucleic acid molecules that contain a fragment or portion that hybridizes under highly stringent conditions to a nucleotide sequence encoding an amino acid sequence selected from SEQ ID NO: 6, 7, 8, or 9. The nucleic acid fragments of the invention are at least about 15, preferably at least about 18, 20, 23 or 25 nucleotides, and can be 30, 40, 50, 100, 200 or more nucleotides in length. Longer fragments, for example, 30 or more nucleotides in length, which encode antigenic polypeptides described herein are particularly useful, such as for the generation of antibodies as described below.

[0033] In a related aspect, the nucleic acid fragments of the invention are used as probes or primers in assays such as those described herein. “Probes” or “primers” are oligonucleotides that hybridize in a base-specific manner to a complementary strand of nucleic acid molecules. Such probes and primers include polypeptide nucleic acids, as described in Nielsen et al., Science, 254, 1497-1500 (1991). As also used herein, the term “primer” in particular refers to a single-stranded oligonucleotide which acts as a point of initiation of template-directed DNA synthesis using well-known methods (e.g., PCR, LCR) including, but not limited to those described herein.

[0034] Typically, a probe or primer comprises a region of nucleotide sequence that hybridizes to at least about 15, typically about 20-25, and more typically about 40, 50 or 75, consecutive nucleotides of a nucleic acid molecule comprising a contiguous nucleotide sequence selected from: SEQ ID NO: 1, the complement of SEQ ID NO: 1, or a sequence encoding an amino acid sequence selected from SEQ ID NO: 6-9. In preferred embodiments, a probe or primer comprises 100 or fewer nucleotides, preferably from 6 to 50 nucleotides, preferably from 12 to 30 nucleotides. In other embodiments, the probe or primer is at least 70% identical to the contiguous nucleotide sequence or to the complement of the contiguous nucleotide sequence, preferably at least 80% identical, more preferably at least 90% identical, even more preferably at least 95% identical, or even capable of selectively hybridizing to the contiguous nucleotide sequence or to the complement of the contiguous nucleotide sequence. Often, the probe or primer further comprises a label, e.g., radioisotope, fluorescent compound, enzyme, or enzyme co-factor.

[0035] Representative oligonucleotides useful as probes or primers include the microsatellite markers shown in Appendix II.

[0036] The nucleic acid molecules of the invention such as those described above can be identified and isolated using standard molecular biology techniques and the sequence information provided in SEQ ID NO: 1, 6, 7, 8, and/or 9. For example, nucleic acid molecules can be amplified and isolated by the polymerase chain reaction using synthetic oligonucleotide primers designed based on one or more of the sequences provided in SEQ ID NO: 1 and/or the complement of SEQ ID NO: 1, or designed based on nucleotides based on sequences encoding one or more of the amino acid sequences provided in SEQ ID NO: 6, 7, 8, and/or 9. See generally PCR Technology: Principles and Applications for DNA Amplification (ed. H. A. Erlich, Freeman Press, NY, N.Y., 1992); PCR Protocols: A Guide to Methods and Applications (Eds. Innis, et al., Academic Press, San Diego, Calif., 1990); Mattila et al., Nucleic Acids Res., 19:4967 (1991); Eckert et al., PCR Methods and Applications, 1:17 (1991); PCR (eds. McPherson et al., IRL Press, Oxford); and U.S. Pat. No. 4,683,202. The nucleic acid molecules can be amplified using cDNA, mRNA or genomic DNA as a template, cloned into an appropriate vector and characterized by DNA sequence analysis.

[0037] Other suitable amplification methods include the ligase chain reaction (LCR) (see Wu and Wallace, Genomics, 4:560 (1989), Landegren et al., Science, 241:1077 (1988), transcription amplification (Kwoh et al., Proc. Natl. Acad. Sci. USA, 86:1173 (1989)), and self-sustained sequence replication (Guatelli et al., Proc. Nat. Acad. Sci. USA, 87:1874 (1990)) and nucleic acid based sequence amplification (NASBA). The latter two amplification methods involve isothermal reactions based on isothermal transcription, which produce both single stranded RNA (ssRNA) and double stranded DNA (dsDNA) as the amplification products in a ratio of about 30 or 100 to 1, respectively.

[0038] The amplified DNA can be radiolabelled and used as a probe for screening a cDNA library derived from human cells, mRNA in zap express, ZIPLOX or other suitable vector. Corresponding clones can be isolated, DNA can obtained following in vivo excision, and the cloned insert can be sequenced in either or both orientations by art recognized methods to identify the correct reading frame encoding a polypeptide of the appropriate molecular weight. For example, the direct analysis of the nucleotide sequence of nucleic acid molecules of the present invention can be accomplished using well-known methods that are commercially available. See, for example, Sambrook et al., Molecular Cloning, A Laboratory Manual (2nd Ed., CSHP, New York 1989); Zyskind et al., Recombinant DNA Laboratory Manual, (Acad. Press, 1988)). Using these or similar methods, the polypeptide and the DNA encoding the polypeptide can be isolated, sequenced and further characterized.

[0039] Antisense nucleic acid molecules of the invention can be designed using the nucleotide sequences of SEQ ID NO: 1 and/or the complement of SEQ ID NO: 1, and/or a portion of SEQ ID NO: 1 or the complement of SEQ ID NO: 1, and/or a sequence encoding the amino acid sequence or SEQ ID NO: 6, 7, 8, and/or 9, or encoding a portion of SEQ ID NO: 6, 7, 8, and/or 9, and constructed using chemical synthesis and enzymatic ligation reactions using procedures known in the art. For example, an antisense nucleic acid molecule (e.g., an antisense oligonucleotide) can be chemically synthesized using naturally occurring nucleotides or variously modified nucleotides designed to increase the biological stability of the molecules or to increase the physical stability of the duplex formed between the antisense and sense nucleic acids, e.g., phosphorothioate derivatives and acridine substituted nucleotides can be used. Alternatively, the antisense nucleic acid molecule can be produced biologically using an expression vector into which a nucleic acid molecule has been subcloned in an antisense orientation (i.e., RNA transcribed from the inserted nucleic acid molecule will be of an antisense orientation to a target nucleic acid of interest).

[0040] In general, the isolated nucleic acid sequences of the invention can be used as molecular weight markers on Southern gels, and as chromosome markers which are labeled to map related gene positions. The nucleic acid sequences can also be used to compare with endogenous DNA sequences in patients to identify genetic disorders (e.g., a predisposition for or susceptibility to schizophrenia), and as probes, such as to hybridize and discover related DNA sequences or to subtract out known sequences from a sample. The nucleic acid sequences can further be used to derive primers for genetic fingerprinting, to raise anti-polypeptide antibodies using DNA immunization techniques, and as an antigen to raise anti-DNA antibodies or elicit immune responses. Portions or fragments of the nucleotide sequences identified herein (and the corresponding complete gene sequences) can be used in numerous ways as polynucleotide reagents. For example, these sequences can be used to: (i) map their respective genes on a chromosome; and, thus, locate gene regions associated with genetic disease; (ii) identify an individual from a minute biological sample (tissue typing); and (iii) aid in forensic identification of a biological sample. Additionally, the nucleotide sequences of the invention can be used to identify and express recombinant polypeptides for analysis, characterization or therapeutic use, or as markers for tissues in which the corresponding polypeptide is expressed, either constitutively, during tissue differentiation, or in diseased states. The nucleic acid sequences can additionally be used as reagents in the screening and/or diagnostic assays described herein, and can also be included as components of kits (e.g., reagent kits) for use in the screening and/or diagnostic assays described herein.

[0041] Another aspect of the invention pertains to nucleic acid constructs containing a nucleic acid molecule selected from the group consisting of SEQ ID NO: 1 and the complement of SEQ ID NO: 1 (or a portion thereof). Yet another aspect of the invention pertains to nucleic acid constructs containing a nucleic acid molecule encoding the amino acid sequence of SEQ ID NO: 6, 7, 8, or 9. The constructs comprise a vector (e.g., an expression vector) into which a sequence of the invention has been inserted in a sense or antisense orientation. As used herein, the term “vector” refers to a nucleic acid molecule capable of transporting another nucleic acid to which it has been linked. One type of vector is a “plasmid”, which refers to a circular double stranded DNA loop into which additional DNA segments can be ligated. Another type of vector is a viral vector, wherein additional DNA segments can be ligated into the viral genome. Certain vectors are capable of autonomous replication in a host cell into which they are introduced (e.g., bacterial vectors having a bacterial origin of replication and episomal mammalian vectors). Other vectors (e.g., non-episomal mammalian vectors) are integrated into the genome of a host cell upon introduction into the host cell, and thereby are replicated along with the host genome. Moreover, certain vectors, expression vectors, are capable of directing the expression of genes to which they are operably linked. In general, expression vectors of utility in recombinant DNA techniques are often in the form of plasmids. However, the invention is intended to include such other forms of expression vectors, such as viral vectors (e.g., replication defective retroviruses, adenoviruses and adeno-associated viruses) that serve equivalent functions.

[0042] Preferred recombinant expression vectors of the invention comprise a nucleic acid molecule of the invention in a form suitable for expression of the nucleic acid molecule in a host cell. This means that the recombinant expression vectors include one or more regulatory sequences, selected on the basis of the host cells to be used for expression, which is operably linked to the nucleic acid sequence to be expressed. Within a recombinant expression vector, “operably linked” is intended to mean that the nucleotide sequence of interest is linked to the regulatory sequence(s) in a manner which allows for expression of the nucleotide sequence (e.g., in an in vitro transcription/translation system or in a host cell when the vector is introduced into the host cell). The term “regulatory sequence” is intended to include promoters, enhancers and other expression control elements (e.g., polyadenylation signals). Such regulatory sequences are described, for example, in Goeddel, Gene Expression Technology: Methods in Enzymology 185, Academic Press, San Diego, Calif. (1990). Regulatory sequences include those which direct constitutive expression of a nucleotide sequence in many types of host cell and those which direct expression of the nucleotide sequence only in certain host cells (e.g., tissue-specific regulatory sequences). It will be appreciated by those skilled in the art that the design of the expression vector can depend on such factors as the choice of the host cell to be transformed and the level of expression of polypeptide desired. The expression vectors of the invention can be introduced into host cells to thereby produce polypeptides, including fusion polypeptides, encoded by nucleic acid molecules as described herein.

[0043] The recombinant expression vectors of the invention can be designed for expression of a polypeptide of the invention in prokaryotic or eukaryotic cells, e.g., bacterial cells such as E. coli, insect cells (using baculovirus expression vectors), yeast cells or mammalian cells. Suitable host cells are discussed further in Goeddel, supra. Alternatively, the recombinant expression vector can be transcribed and translated in vitro, for example using T7 promoter regulatory sequences and T7 polymerase.

[0044] Another aspect of the invention pertains to host cells into which a recombinant expression vector of the invention has been introduced. The terms “host cell” and “recombinant host cell” are used interchangeably herein. It is understood that such terms refer not only to the particular subject cell but also to the progeny or potential progeny of such a cell. Because certain modifications may occur in succeeding generations due to either mutation or environmental influences, such progeny may not, in fact, be identical to the parent cell, but are still included within the scope of the term as used herein.

[0045] A host cell can be any prokaryotic or eukaryotic cell. For example, a nucleic acid molecule of the invention can be expressed in bacterial cells (e.g., E. coli), insect cells, yeast or mammalian cells (such as Chinese hamster ovary cells (CHO) or COS cells). Other suitable host cells are known to those skilled in the art.

[0046] Vector DNA can be introduced into prokaryotic or eukaryotic cells via conventional transformation or transfection techniques. As used herein, the terms “transformation” and “transfection” are intended to refer to a variety of art-recognized techniques for introducing a foreign nucleic acid molecule (e.g., DNA) into a host cell, including calcium phosphate or calcium chloride co-precipitation, DEAE-dextran-mediated transfection, lipofection, or electroporation. Suitable methods for transforming or transfecting host cells can be found in Sambrook, et al. (supra), and other laboratory manuals.

[0047] For stable transfection of mammalian cells, it is known that, depending upon the expression vector and transfection technique used, only a small fraction of cells may integrate the foreign DNA into their genome. In order to identify and select these integrants, a gene that encodes a selectable marker (e.g., for resistance to antibiotics) is generally introduced into the host cells along with the gene of interest. Preferred selectable markers include those that confer resistance to drugs, such as G418, hygromycin and methotrexate. Nucleic acid molecules encoding a selectable marker can be introduced into a host cell on the same vector as the nucleic acid molecule of the invention or can be introduced on a separate vector. Cells stably transfected with the introduced nucleic acid molecule can be identified by drug selection (e.g., cells that have incorporated the selectable marker gene will survive, while the other cells die).

[0048] A host cell of the invention, such as a prokaryotic or eukaryotic host cell in culture, can be used to produce (i.e., express) a polypeptide of the invention. Accordingly, the invention further provides methods for producing a polypeptide using the host cells of the invention. In one embodiment, the method comprises culturing the host cell of invention (into which a recombinant expression vector encoding a polypeptide of the invention has been introduced) in a suitable medium such that the polypeptide is produced. In another embodiment, the method further comprises isolating the polypeptide from the medium or the host cell.

[0049] The host cells of the invention can also be used to produce nonhuman transgenic animals. For example, in one embodiment, a host cell of the invention is a fertilized oocyte or an embryonic stem cell into which a nucleic acid molecule of the invention (e.g, an exogenous NRG1AG1 gene, or an exogenous nucleic acid encoding an NRG1AG1 polypeptide) has been introduced. Such host cells can then be used to create non-human transgenic animals in which exogenous nucleotide sequences have been introduced into the genome or homologous recombinant animals in which endogenous nucleotide sequences have been altered. Such animals are useful for studying the function and/or activity of the nucleotide sequence and polypeptide encoded by the sequence and for identifying and/or evaluating modulators of their activity. As used herein, a “transgenic animal” is a non-human animal, preferably a mammal, more preferably a rodent such as a rat or mouse, in which one or more of the cells of the animal includes a transgene. Other examples of transgenic animals include non-human primates, sheep, dogs, cows, goats, chickens and amphibians. A transgene is exogenous DNA which is integrated into the genome of a cell from which a transgenic animal develops and which remains in the genome of the mature animal, thereby directing the expression of an encoded gene product in one or more cell types or tissues of the transgenic animal. As used herein, an “homologous recombinant animal” is a non-human animal, preferably a mammal, more preferably a mouse, in which an endogenous gene has been altered by homologous recombination between the endogenous gene and an exogenous DNA molecule introduced into a cell of the animal, e.g., an embryonic cell of the animal, prior to development of the animal.

[0050] Methods for generating transgenic animals via embryo manipulation and microinjection, particularly animals such as mice, have become conventional in the art and are described, for example, in U.S. Pat. Nos. 4,736,866 and 4,870,009, U.S. Pat. No. 4,873,191 and in Hogan, Manipulating the Mouse Embryo (Cold Spring Harbor Laboratory Press, Cold Spring Harbor, N.Y., 1986). Methods for constructing homologous recombination vectors and homologous recombinant animals are described further in Bradley (1991) Current Opinion in Bio/Technology, 2:823-829 and in PCT Publication Nos. WO 90/11354, WO 91/01140, WO 92/0968, and WO 93/04169. Clones of the non-human transgenic animals described herein can also be produced according to the methods described in Wilmut et al. (1997) Nature, 385:810-813 and PCT Publication Nos. WO 97/07668 and WO 97/07669.

### POLYPEPTIDES OF THE INVENTION

[0051] The present invention also pertains to isolated polypeptides encoded by NRG1AG1 (“NRG1AG1 polypeptides”), and fragments and variants thereof, as well as polypeptides encoded by nucleotide sequences described herein (e.g., other splicing variants). The term “polypeptide” refers to a polymer of amino acids, and not to a specific length; thus, peptides, oligopeptides and proteins are included within the definition of a polypeptide. As used herein, a polypeptide is said to be “isolated” or “purified” when it is substantially free of cellular material when it is isolated from recombinant and non-recombinant cells, or free of chemical precursors or other chemicals when it is chemically synthesized. A polypeptide, however, can be joined to another polypeptide with which it is not normally associated in a cell (e.g., in a “fusion protein”) and still be “isolated” or “purified.”

[0052] The polypeptides of the invention can be purified to homogeneity. It is understood, however, that preparations in which the polypeptide is not purified to homogeneity are useful. The critical feature is that the preparation allows for the desired function of the polypeptide, even in the presence of considerable amounts of other components. Thus, the invention encompasses various degrees of purity. In one embodiment, the language “substantially free of cellular material” includes preparations of the polypeptide having less than about 30% (by dry weight) other proteins (i.e., contaminating protein), less than about 20% other proteins, less than about 10% other proteins, or less than about 5% other proteins.

[0053] When a polypeptide is recombinantly produced, it can also be substantially free of culture medium, i.e., culture medium represents less than about 20%, less than about 10%, or less than about 5% of the volume of the polypeptide preparation. The language “substantially free of chemical precursors or other chemicals” includes preparations of the polypeptide in which it is separated from chemical precursors or other chemicals that are involved in its synthesis. In one embodiment, the language “substantially free of chemical precursors or other chemicals” includes preparations of the polypeptide having less than about 30% (by dry weight) chemical precursors or other chemicals, less than about 20% chemical precursors or other chemicals, less than about 10% chemical precursors or other chemicals, or less than about 5% chemical precursors or other chemicals.

[0054] In one embodiment, a polypeptide of the invention comprises an amino acid sequence encoded by a nucleic acid molecule comprising a nucleotide sequence selected from the group consisting of SEQ ID NO: 1 and complements and portions thereof, e.g., SEQ ID NO: 6, SEQ ID NO: 7, SEQ ID NO: 8 or SEQ ID NO: 9, or a portion of SEQ ID NO: 6, 7, 8, or 9. However, the polypeptides of the invention also encompass fragments and sequence variants. Variants include a substantially homologous polypeptide encoded by the same genetic locus in an organism, i.e., an allelic variant, as well as other splicing variants. Variants also encompass polypeptides derived from other genetic loci in an organism, but having substantial homology to a polypeptide encoded by a nucleic acid molecule comprising a nucleotide sequence selected from the group consisting of SEQ ID NO: 1 and complements and portions thereof, or having substantial homology to a polypeptide encoded by a nucleic acid molecule comprising a nucleotide sequence selected from the group consisting of nucleotide sequences encoding SEQ ID NO: 6, 7, 8, and 9. Variants also include polypeptides substantially homologous or identical to these polypeptides but derived from another organism, i.e., an ortholog. Variants also include polypeptides that are substantially homologous or identical to these polypeptides that are produced by chemical synthesis. Variants also include polypeptides that are substantially homologous or identical to these polypeptides that are produced by recombinant methods.

[0055] As used herein, two polypeptides (or a region of the polypeptides) are substantially homologous or identical when the amino acid sequences are at least about 45-55%, typically at least about 70-75%, more typically at least about 80-85%, and most typically greater than about 90% or more homologous or identical. A substantially homologous amino acid sequence, according to the present invention, will be encoded by a nucleic acid molecule hybridizing to SEQ ID NO: 1, or portion thereof, under stringent conditions as more particularly described above, or will be encoded by a nucleic acid molecule hybridizing to a nucleic acid sequence encoding SEQ ID NO: 6, 7, 8, or 9, or portion thereof, under stringent conditions as more particularly described thereof.

[0056] To determine the percent homology or identity of two amino acid sequences, or of two nucleic acid sequences, the sequences are aligned for optimal comparison purposes (e.g., gaps can be introduced in the sequence of one polypeptide or nucleic acid molecule for optimal alignment with the other polypeptide or nucleic acid molecule). The amino acid residues or nucleotides at corresponding amino acid positions or nucleotide positions are then compared. When a position in one sequence is occupied by the same amino acid residue or nucleotide as the corresponding position in the other sequence, then the molecules are homologous at that position. As used herein, amino acid or nucleic acid “homology” is equivalent to amino acid or nucleic acid “identity”. The percent homology between the two sequences is a function of the number of identical positions shared by the sequences (i.e., percent homology equals the number of identical positions/total number of positions times 100).

[0057] The invention also encompasses polypeptides having a lower degree of identity but having sufficient similarity so as to perform one or more of the same functions performed by a polypeptide encoded by a nucleic acid molecule of the invention. Similarity is determined by conserved amino acid substitution. Such substitutions are those that substitute a given amino acid in a polypeptide by another amino acid of like characteristics. Conservative substitutions are likely to be phenotypically silent. Typically seen as conservative substitutions are the replacements, one for another, among the aliphatic amino acids Ala, Val, Leu and Ile; interchange of the hydroxyl residues Ser and Thr, exchange of the acidic residues Asp and Glu, substitution between the amide residues Asn and Gln, exchange of the basic residues Lys and Arg and replacements among the aromatic residues Phe and Tyr. Guidance concerning which amino acid changes are likely to be phenotypically silent are found in Bowie et al., Science 247:1306-1310 (1990).

[0058] A variant polypeptide can differ in amino acid sequence by one or more substitutions, deletions, insertions, inversions, fusions, and truncations or a combination of any of these. Further, variant polypeptides can be fully functional or can lack function in one or more activities. Fully functional variants typically contain only conservative variation or variation in non-critical residues or in non-critical regions. Functional variants can also contain substitution of similar amino acids that result in no change or an insignificant change in function. Alternatively, such substitutions may positively or negatively affect function to some degree. Non-functional variants typically contain one or more non-conservative amino acid substitutions, deletions, insertions, inversions, or truncation or a substitution, insertion, inversion, or deletion in a critical residue or critical region.

[0059] Amino acids that are essential for function can be identified by methods known in the art, such as site-directed mutagenesis or alanine-scanning mutagenesis (Cunningham et al., Science, 244:1081-1085 (1989)). The latter procedure introduces single alanine mutations at every residue in the molecule. The resulting mutant molecules are then tested for biological activity in vitro, or in vitro proliferative activity. Sites that are critical for polypeptide activity can also be determined by structural analysis such as crystallization, nuclear magnetic resonance or photoaffinity labeling (Smith et al., J. Mol. Biol., 224:899-904 (1992); de Vos et al. Science, 255:306-312 (1992)).

[0060] The invention also includes polypeptide fragments of the polypeptides of the invention. Fragments can be derived from a polypeptide encoded by a nucleic acid molecule comprising SEQ ID NO: 1 or a portion thereof and the complements thereof (e.g., SEQ ID NO: 6, 7, 8, or 9, or other splicing variants). However, the invention also encompasses fragments of the variants of the polypeptides described herein. As used herein, a fragment comprises at least 6 contiguous amino acids. Useful fragments include those that retain one or more of the biological activities of the polypeptide as well as fragments that can be used as an immunogen to generate polypeptide-specific antibodies.

[0061] Biologically active fragments (peptides which are, for example, 6, 9, 12, 15, 16, 20, 30, 35, 36, 37, 38, 39, 40, 50, 100 or more amino acids in length) can comprise a domain, segment, or motif that has been identified by analysis of the polypeptide sequence using well-known methods, e.g., signal peptides, extracellular domains, one or more transmembrane segments or loops, ligand binding regions, zinc finger domains, DNA binding domains, acylation sites, glycosylation sites, or phosphorylation sites.

[0062] Fragments can be discrete (not fused to other amino acids or polypeptides) or can be within a larger polypeptide. Further, several fragments can be comprised within a single larger polypeptide. In one embodiment a fragment designed for expression in a host can have heterologous pre- and pro-polypeptide regions fused to the amino terminus of the polypeptide fragment and an additional region fused to the carboxyl terminus of the fragment.

[0063] The invention thus provides chimeric or fusion polypeptides. These comprise a polypeptide of the invention operatively linked to a heterologous protein or polypeptide having an amino acid sequence not substantially homologous to the polypeptide. “Operatively linked” indicates that the polypeptide and the heterologous protein are fused in-frame. The heterologous protein can be fused to the N-terminus or C-terminus of the polypeptide. In one embodiment the fusion polypeptide does not affect function of the polypeptide per se. For example, the fusion polypeptide can be a GST-fusion polypeptide in which the polypeptide sequences are fused to the C-terminus of the GST sequences. Other types of fusion polypeptides include, but are not limited to, enzymatic fusion polypeptides, for example β-galactosidase fusions, yeast two-hybrid GAL fusions, poly-His fusions and Ig fusions. Such fusion polypeptides, particularly poly-His fusions, can facilitate the purification of recombinant polypeptide. In certain host cells (e.g., mammalian host cells), expression and/or secretion of a polypeptide can be increased by using a heterologous signal sequence. Therefore, in another embodiment, the fusion polypeptide contains a heterologous signal sequence at its N-terminus.

[0064] EP-A-O 464 533 discloses fusion proteins comprising various portions of immunoglobulin constant regions. The Fc is useful in therapy and diagnosis and thus results, for example, in improved pharmacokinetic properties (EP-A 0232 262). In drug discovery, for example, human proteins have been fused with Fc portions for the purpose of high-throughput screening assays to identify antagonists. Bennett et al., Journal of Molecular Recognition, 8:52-58 (1995) and Johanson et al, The Journal of Biological Chemistry, 270,16:9459-9471 (1995). Thus, this invention also encompasses soluble fusion polypeptides containing a polypeptide of the invention and various portions of the constant regions of heavy or light chains of immunoglobulins of various subclass (IgG, IgM, IgA, IgE).

[0065] A chimeric or fusion polypeptide can be produced by standard recombinant DNA techniques. For example, DNA fragments coding for the different polypeptide sequences are ligated together in-frame in accordance with conventional techniques. In another embodiment, the fusion gene can be synthesized by conventional techniques including automated DNA synthesizers. Alternatively, PCR amplification of nucleic acid fragments can be carried out using anchor primers which give rise to complementary overhangs between two consecutive nucleic acid fragments which can subsequently be annealed and re-amplified to generate a chimeric nucleic acid sequence (see Ausubel et al., Current Protocols in Molecular Biology, 1992). Moreover, many expression vectors are commercially available that already encode a fusion moiety (e.g., a GST protein). A nucleic acid molecule encoding a polypeptide of the invention can be cloned into such an expression vector such that the fusion moiety is linked in-frame to the polypeptide.

[0066] The isolated polypeptide can be purified from cells that naturally express it, purified from cells that have been altered to express it (recombinant), or synthesized using known protein synthesis methods. In one embodiment, the polypeptide is produced by recombinant DNA techniques. For example, a nucleic acid molecule encoding the polypeptide is cloned into an expression vector, the expression vector introduced into a host cell and the polypeptide expressed in the host cell. The polypeptide can then be isolated from the cells by an appropriate purification scheme using standard protein purification techniques.

[0067] In general, polypeptides of the present invention can be used as a molecular weight marker on SDS-PAGE gels or on molecular sieve gel filtration columns using art-recognized methods. The polypeptides of the present invention can be used to raise antibodies or to elicit an immune response. The polypeptides can also be used as a reagent, e.g., a labeled reagent, in assays to quantitatively determine levels of the polypeptide or a molecule to which it binds (e.g., a receptor or a ligand) in biological fluids. The polypeptides can also be used as markers for cells or tissues in which the corresponding polypeptide is preferentially expressed, either constitutively, during tissue differentiation, or in a diseased state. The polypeptides can be used to isolate a corresponding binding agent, e.g., receptor or ligand, such as, for example, in an interaction trap assay, and to screen for peptide or small molecule antagonists or agonists of the binding interaction.

### ANTIBODIES OF THE INVENTION

[0068] In another aspect, the invention provides antibodies to the polypeptides and polypeptide fragments of the invention, e.g., having an amino acid sequence encoded by SEQ ID NO: 6, 7, 8, 9, or a portion thereof, or having an amino acid sequence encoded by a nucleic acid molecule comprising all or a portion of SEQ ID NO: 1 (e.g., SEQ ID NO: 6, 7, 8, 9, or another splicing variant, or portion thereof). The term “antibody” as used herein refers to immunoglobulin molecules and immunologically active portions of immunoglobulin molecules, i.e., molecules that contain an antigen binding site that specifically binds an antigen. A molecule that specifically binds to a polypeptide of the invention is a molecule that binds to that polypeptide or a fragment thereof, but does not substantially bind other molecules in a sample, e.g., a biological sample, which naturally contains the polypeptide. Examples of immunologically active portions of immunoglobulin molecules include F(ab) and F(ab′)₂ fragments which can be generated by treating the antibody with an enzyme such as pepsin. The invention provides polyclonal and monoclonal antibodies that bind to a polypeptide of the invention. The term “monoclonal antibody” or “monoclonal antibody composition”, as used herein, refers to a population of antibody molecules that contain only one species of an antigen binding site capable of immunoreacting with a particular epitope of a polypeptide of the invention. A monoclonal antibody composition thus typically displays a single binding affinity for a particular polypeptide of the invention with which it immunoreacts.

[0069] Polyclonal antibodies can be prepared as described above by immunizing a suitable subject with a desired immunogen, e.g., polypeptide of the invention or fragment thereof. The antibody titer in the immunized subject can be monitored over time by standard techniques, such as with an enzyme linked immunosorbent assay (ELISA) using immobilized polypeptide. If desired, the antibody molecules directed against the polypeptide can be isolated from the mammal (e.g., from the blood) and further purified by well-known techniques, such as protein A chromatography to obtain the IgG fraction. At an appropriate time after immunization, e.g., when the antibody titers are highest, antibody-producing cells can be obtained from the subject and used to prepare monoclonal antibodies by standard techniques, such as the hybridoma technique originally described by Kohler and Milstein (1975) Nature, 256:495-497, the human B cell hybridoma technique (Kozbor et al. (1983) Immunol Today, 4:72), the EBV-hybridoma technique (Cole et al. (1985), Monoclonal Antibodies and Cancer Therapy, Alan R. Liss, Inc., pp. 77-96) or trioma techniques. The technology for producing hybridomas is well known (see generally Current Protocols in Immunology (1994) Coligan et al. (eds.) John Wiley & Sons, Inc., New York, N.Y.). Briefly, an immortal cell line (typically a myeloma) is fused to lymphocytes (typically splenocytes) from a mammal immunized with an immunogen as described above, and the culture supernatants of the resulting hybridoma cells are screened to identify a hybridoma producing a monoclonal antibody that binds a polypeptide of the invention.

[0070] Any of the many well known protocols used for fusing lymphocytes and immortalized cell lines can be applied for the purpose of generating a monoclonal antibody to a polypeptide of the invention (see, e.g., Current Protocols in Immunology, supra; Galfre et al. (1977) Nature, 266:55052; R. H. Kenneth, in Monoclonal Antibodies: A New Dimension In Biological Analyses, Plenum Publishing Corp., New York, N.Y. (1980); and Lemer (1981) Yale J. Biol. Med., 54:387-402. Moreover, the ordinarily skilled worker will appreciate that there are many variations of such methods that also would be useful.

[0071] Alternative to preparing monoclonal antibody-secreting hybridomas, a monoclonal antibody to a polypeptide of the invention can be identified and isolated by screening a recombinant combinatorial immunoglobulin library (e.g., an antibody phage display library) with the polypeptide to thereby isolate immunoglobulin library members that bind the polypeptide. Kits for generating and screening phage display libraries are commercially available (e.g., the Pharmacia Recombinant Phage Antibody System, Catalog No. 27-9400-01; and the Stratagene SurfZAP™ Phage Display Kit, Catalog No. 240612). Additionally, examples of methods and reagents particularly amenable for use in generating and screening antibody display library can be found in, for example, U.S. Pat. No. 5,223,409; PCT Publication No. WO 92/18619; PCT Publication No. WO 91/17271; PCT Publication No. WO 92/20791; PCT Publication No. WO 92/15679; PCT Publication No. WO 93/01288; PCT Publication No. WO 92/01047; PCT Publication No. WO 92/09690; PCT Publication No. WO 90/02809; Fuchs et al. (1991) Bio/Technology, 9:1370-1372; Hay et al. (1992) Hum. Antibod. Hybridomas, 3:81-85; Huse et al. (1989) Science, 246:1275-1281; Griffiths et al. (1993) EMBO J, 12:725-734.

[0072] Additionally, recombinant antibodies, such as chimeric and humanized monoclonal antibodies, comprising both human and non-human portions, which can be made using standard recombinant DNA techniques, are within the scope of the invention. Such chimeric and humanized monoclonal antibodies can be produced by recombinant DNA techniques known in the art.

[0073] In general, antibodies of the invention (e.g., a monoclonal antibody) can be used to isolate a polypeptide of the invention by standard techniques, such as affinity chromatography or immunoprecipitation. A polypeptide-specific antibody can facilitate the purification of natural polypeptide from cells and of recombinantly produced polypeptide expressed in host cells. Moreover, an antibody specific for a polypeptide of the invention can be used to detect the polypeptide (e.g., in a cellular lysate, cell supernatant, or tissue sample) in order to evaluate the abundance and pattern of expression of the polypeptide. Antibodies can be used diagnostically to monitor protein levels in tissue as part of a clinical testing procedure, e.g., to, for example, determine the efficacy of a given treatment regimen. Detection can be facilitated by coupling the antibody to a detectable substance. Examples of detectable substances include various enzymes, prosthetic groups, fluorescent materials, luminescent materials, bioluminescent materials, and radioactive materials. Examples of suitable enzymes include horseradish peroxidase, alkaline phosphatase, β-galactosidase, or acetylcholinesterase; examples of suitable prosthetic group complexes include streptavidin/biotin and avidin/biotin; examples of suitable fluorescent materials include umbelliferone, fluorescein, fluorescein isothiocyanate, rhodamine, dichlorotriazinylamine fluorescein, dansyl chloride or phycoerythrin; an example of a luminescent material includes luminol; examples of bioluminescent materials include luciferase, luciferin, and aequorin, and examples of suitable radioactive material include 125I, 131I, 35S or 3H.

### DIAGNOSTIC AND SCREENING ASSAYS OF THE INVENTION

[0074] The present invention also pertains to diagnostic assays for assessing NRG1AG1 gene expression, or for assessing activity of NRG1AG1 polypeptides of the invention. In one embodiment, the assays are used in the context of a biological sample (e.g., blood, serum, cells, tissue) to thereby determine whether an individual is afflicted with schizophrenia, or is at risk for (has a predisposition for or a susceptibility to) developing schizophrenia. The invention also provides for prognostic (or predictive) assays for determining whether an individual is susceptible to developing schizophrenia. For example, mutations in the gene can be assayed in a biological sample. Such assays can be used for prognostic or predictive purpose to thereby prophylactically treat an individual prior to the onset of symptoms associated with schizophrenia. Another aspect of the invention pertains to assays for monitoring the influence of agents (e.g., drugs, compounds or other agents) on the gene expression or activity of polypeptides of the invention, as well as to assays for identifying agents which bind to NRG1AG1 polypeptides. These and other assays and agents are described in further detail in the following sections.

[0075] Diagnostic Assays

[0076] The nucleic acids, probes, primers, polypeptides and antibodies described herein can be used in methods of diagnosis of a susceptibility to schizophrenia, as well as in kits useful for diagnosis of a susceptibility to schizophrenia.

[0077] In one embodiment of the invention, diagnosis of a susceptibility to schizophrenia is made by detecting a polymorphism in NRG1AG1. The polymorphism can be a mutation in NRG1AG1, such as the insertion or deletion of a single nucleotide, or of more than one nucleotide, resulting in a frame shift mutation; the change of at least one nucleotide, resulting in a change in the encoded amino acid; the change of at least one nucleotide, resulting in the generation of a premature stop codon; the deletion of several nucleotides, resulting in a deletion of one or more amino acids encoded by the nucleotides; the insertion of one or several nucleotides, such as by unequal recombination or gene conversion, resulting in an interruption of the coding sequence of the gene; duplication of all or a part of the gene; transposition of all or a part of the gene; or rearrangement of all or a part of the gene. More than one such mutation may be present in a single gene. Such sequence changes cause a mutation in the polypeptide encoded by NRG1AG1. For example, if the mutation is a frame shift mutation, the frame shift can result in a change in the encoded amino acids, and/or can result in the generation of a premature stop codon, causing generation of a truncated polypeptide. Alternatively, a polymorphism associated with a susceptibility to schizophrenia can be a synonymous mutation in one or more nucleotides (i.e., a mutation that does not result in a change in the polypeptide encoded by NRG1AG1). Such a polymorphism may alter splicing sites, affect the stability or transport of MRNA, or otherwise affect the transcription or translation of the gene. NRG1AG1 that has any of the mutations described above is referred to herein as a “mutant gene.”

[0078] In a first method of diagnosing a susceptibility to schizophrenia, hybridization methods, such as Southern analysis, Northern analysis, or in situ hybridizations, can be used (see Current Protocols in Molecular Biology, Ausubel, F. et al., eds., John Wiley & Sons, including all supplements through 1999). For example, a biological sample from a test subject (a “test sample”) of genomic DNA, RNA, or cDNA, is obtained from an individual suspected of having, being susceptible to or predisposed for, or carrying a defect for, schizophrenia (the “test individual”). The individual can be an adult, child, or fetus. The test sample can be from any source which contains genomic DNA, such as a blood sample, sample of amniotic fluid, sample of cerebrospinal fluid, or tissue sample from skin, muscle, buccal or conjunctival mucosa, placenta, gastrointestinal tract or other organs. A test sample of DNA from fetal cells or tissue can be obtained by appropriate methods, such as by amniocentesis or chorionic villus sampling. The DNA, RNA, or cDNA sample is then examined to determine whether a polymorphism in NRG1AG1 is present, and/or to determine which splicing variant(s) encoded by NRG1AG1 is present. The presence of the polymorphism or splicing variant(s) can be indicated by hybridization of the gene in the genomic DNA, RNA, or cDNA to a nucleic acid probe. A “nucleic acid probe”, as used herein, can be a DNA probe or an RNA probe; the nucleic acid probe can contain at least one polymorphism in NRG1AG1 or contains a nucleic acid encoding a particular splicing variant of NRG1AG1. The probe can be any of the nucleic acid molecules described above (e.g., the gene, a fragment, a vector comprising the gene, a probe or primer, etc.)

[0079] To diagnose a susceptibility to schizophrenia, a hybridization sample is formed by contacting the test sample containing NRG1AG1, with at least one nucleic acid probe. A preferred probe for detecting mRNA or genomic DNA is a labeled nucleic acid probe capable of hybridizing to mRNA or genomic DNA sequences described herein. The nucleic acid probe can be, for example, a full-length nucleic acid molecule, or a portion thereof, such as an oligonucleotide of at least 15, 30, 50, 100, 250 or 500 nucleotides in length and sufficient to specifically hybridize under stringent conditions to appropriate mNRA or genomic DNA. For example, the nucleic acid probe can be all or a portion of SEQ ID NO: 1, or the complement of SEQ ID NO: 1, or a portion thereof; or can be a nucleic acid encoding all or a portion of SEQ ID NO: 6, 7, 8, or 9. Other suitable probes for use in the diagnostic assays of the invention are described above (see, e.g., probes and primers discussed under the heading, “Nucleic Acids of the Invention”).

[0080] The hybridization sample is maintained under conditions which are sufficient to allow specific hybridization of the nucleic acid probe to NRG1AG1. “Specific hybridization”, as used herein, indicates exact hybridization (e.g., with no mismatches). Specific hybridization can be performed under high stringency conditions or moderate stringency conditions, for example, as described above. In a particularly preferred embodiment, the hybridization conditions for specific hybridization are high stringency.

[0081] Specific hybridization, if present, is then detected using standard methods. If specific hybridization occurs between the nucleic acid probe and NRG1AG1 in the test sample, then NRG1AG1 has the polymorphism, or is the splicing variant, that is present in the nucleic acid probe. More than one nucleic acid probe can also be used concurrently in this method. Specific hybridization of any one of the nucleic acid probes is indicative of a polymorphism in NRG1AG1, or of the presence of a particular splicing variant encoded by NRG1AG1, and is therefore diagnostic for a susceptibility to schizophrenia.

[0082] In Northern analysis (see Current Protocols in Molecular Biology, Ausubel, F. et al., eds., John Wiley & Sons, supra), the hybridization methods described above are used to identify the presence of a polymorphism or of a particular splicing variant, associated with a susceptibility to schizophrenia. For Northern analysis, a test sample of RNA is obtained from the individual by appropriate means. Specific hybridization of a nucleic acid probe, as described above, to RNA from the individual is indicative of a polymorphism in NRG1AG1, or of the presence of a particular splicing variant encoded by NRG1AG1, and is therefore diagnostic for a susceptibility to schizophrenia.

[0083] For representative examples of use of nucleic acid probes, see, for example, U.S. Pat. Nos. 5,288,611 and 4,851,330.

[0084] Alternatively, a peptide nucleic acid (PNA) probe can be used instead of a nucleic acid probe in the hybridization methods described above. PNA is a DNA mimic having a peptide-like, inorganic backbone, such as N-(2-aminoethyl)glycine units, with an organic base (A, G, C, T or U) attached to the glycine nitrogen via a methylene carbonyl linker (see, for example, Nielsen, P. E. et al., Bioconjugate Chemistry, 1994, 5, American Chemical Society, p. 1 (1994). The PNA probe can be designed to specifically hybridize to a gene having a polymorphism associated with a susceptibility to schizophrenia. Hybridization of the PNA probe to NRG1AG1 is diagnostic for a susceptibility to schizophrenia.

[0085] In another method of the invention, mutation analysis by restriction digestion can be used to detect a mutant gene, or genes containing a polymorphism(s), if the mutation or polymorphism in the gene results in the creation or elimination of a restriction site. A test sample containing genomic DNA is obtained from the individual. Polymerase chain reaction (PCR) can be used to amplify NRG1AG1 (and, if necessary, the flanking sequences) in the test sample of genomic DNA from the test individual. RFLP analysis is conducted as described (see Current Protocols in Molecular Biology, supra). The digestion pattern of the relevant DNA fragment indicates the presence or absence of the mutation or polymorphism in NRG1AG1, and therefore indicates the presence or absence of this susceptibility to schizophrenia.

[0086] Sequence analysis can also be used to detect specific polymorphisms in NRG1AG1. A test sample of DNA or RNA is obtained from the test individual. PCR or other appropriate methods can be used to amplify the gene, and/or its flanking sequences, if desired. The sequence of NRG1AG1, or a fragment of the gene, or cDNA, or fragment of the cDNA, or mRNA, or fragment of the mNRA, is determined, using standard methods. The sequence of the gene, gene fragment, cDNA, cDNA fragment, mNRA, or mNRA fragment is compared with the known nucleic acid sequence of the gene, cDNA (e.g., SEQ ID NO: 1, or a nucleic acid sequence encoding SEQ ID NO: 6, 7, 8, or 9, or a fragment thereof) or mRNA, as appropriate. The presence of a polymorphism in NRG1AG1 in37 dicates that the individual has a susceptibility to schizophrenia.

[0087] Allele-specific oligonucleotides can also be used to detect the presence of a polymorphism in NRG1AG1, through the use of dot-blot hybridization of amplified oligonucleotides with allele-specific oligonucleotide (ASO) probes (see, for example, Saiki, R. et al., (1986), Nature (London) 324:163-166). An “allele-specific oligonucleotide” (also referred to herein as an “allele-specific oligonucleotide probe”) is an oligonucleotide of approximately 10-50 base pairs, preferably approximately 15-30 base pairs, that specifically hybridizes to NRG1AG1, and that contains a polymorphism associated with a susceptibility to schizophrenia. An allele-specific oligonucleotide probe that is specific for particular polymorphisms in NRG1AG1 can be prepared, using standard methods (see Current Protocols in Molecular Biology, supra). To identify polymorphisms in the gene that are associated with a susceptibility to schizophrenia, a test sample of DNA is obtained from the individual. PCR can be used to amplify all or a fragment of NRG1AG1, and its flanking sequences. The DNA containing the amplified NRG1AG1 (or fragment of the gene) is dot-blotted, using standard methods (see Current Protocols in Molecular Biology, supra), and the blot is contacted with the oligonucleotide probe. The presence of specific hybridization of the probe to the amplified NRG1AG1 is then detected. Specific hybridization of an allele-specific oligonucleotide probe to DNA from the individual is indicative of a polymorphism in NRG1AG1, and is therefore indicative of a susceptibility to schizophrenia.

[0088] In another embodiment, arrays of oligonucleotide probes that are complementary to target nucleic acid sequence segments from an individual, can be used to identify polymorphisms in NRG1AG1. For example, in one embodiment, an oligonucleotide array can be used. Oligonucleotide arrays typically comprise a plurality of different oligonucleotide probes that are coupled to a surface of a substrate in different known locations. These oligonucleotide arrays, also described as “Genechips.™.,” have been generally described in the art, for example, U.S. Pat. No. 5,143,854 and PCT patent publication Nos. WO 90/15070 and 92/10092. These arrays can generally be produced using mechanical synthesis methods or light directed synthesis methods which incorporate a combination of photolithographic methods and solid phase oligonucleotide synthesis methods. See Fodor et al., Science, 251:767-777 (1991), Pirrung et al., U.S. Pat. No. 5,143,854 (see also PCT application Ser. No. WO 90/15070) and Fodor et al., PCT Publication No. WO 92/10092 and U.S. Pat. No. 5,424,186, the entire teachings of each of which are incorporated by reference herein. Techniques for the synthesis of these arrays using mechanical synthesis methods are described in, e.g., U.S. Pat. No. 5,384,261, the entire teachings of which are incorporated by reference herein.

[0089] Once an oligonucleotide array is prepared, a nucleic acid of interest is hybridized with the array and scanned for polymorphisms. Hybridization and scanning are generally carried out by methods described herein and also in, e.g., Published PCT application Ser. Nos. WO 92/10092 and WO 95/11995, and U.S. Pat. No. 5,424,186, the entire teachings of which are incorporated by reference herein. In brief, a target nucleic acid sequence which includes one or more previously identified polymorphic markers is amplified by well known amplification techniques, e.g., PCR. Typically, this involves the use of primer sequences that are complementary to the two strands of the target sequence both upstream and downstream from the polymorphism. Asymmetric PCR techniques may also be used. Amplified target, generally incorporating a label, is then hybridized with the array under appropriate conditions. Upon completion of hybridization and washing of the array, the array is scanned to determine the position on the array to which the target sequence hybridizes. The hybridization data obtained from the scan is typically in the form of fluorescence intensities as a function of location on the array.

[0090] Although primarily described in terms of a single detection block, e.g., for detection of a single polymorphism, arrays can include multiple detection blocks, and thus be capable of analyzing multiple, specific polymorphisms. In alternate arrangements, it will generally be understood that detection blocks may be grouped within a single array or in multiple, separate arrays so that varying, optimal conditions may be used during the hybridization of the target to the array. For example, it may often be desirable to provide for the detection of those polymorphisms that fall within G-C rich stretches of a genomic sequence, separately from those falling in A-T rich segments. This allows for the separate optimization of hybridization conditions for each situation.

[0091] Additional description of use of oligonucleotide arrays for detection of polymorphisms can be found, for example, in U.S. Pat. Nos. 5,858,659 and 5,837,832, the entire teachings of which are incorporated by reference herein.

[0092] Other methods of nucleic acid analysis can be used to detect polymorphisms in NRG1AG1 or splicing variants encoded by NRG1AG1. Representative methods include direct manual sequencing (Church and Gilbert, (1988), Proc. Natl. Acad. Sci. USA 81:1991-1995; Sanger, F. et al. (1977) Proc. Natl. Acad. Sci. 74:5463-5467; Beavis et al. U.S. Pat. No. 5,288,644); automated fluorescent sequencing; single-stranded conformation polymorphism assays (SSCP); clamped denaturing gel electrophoresis (CDGE); denaturing gradient gel electrophoresis (DGGE) (Sheffield, V. C. et al. (19891) Proc. Natl. Acad. Sci. USA 86:232-236), mobility shift analysis (Orita, M. et al. (1989) Proc. Natl. Acad. Sci. USA 86:2766-2770), restriction enzyme analysis (Flavell et al. (1978) Cell 15:25; Geever, et al. (1981) Proc. Natl. Acad. Sci. USA 78:5081); heteroduplex analysis; chemical mismatch cleavage (CMC) (Cotton et al. (1985) Proc. Natl. Acad. Sci. USA 85:4397-4401); RNase protection assays (Myers, R. M. et al. (1985) Science 230:1242); use of polypeptides which recognize nucleotide mismatches, such as E. coli mutS protein; allele-specific PCR, for example.

[0093] In another embodiment of the invention, diagnosis of a susceptibility to schizophrenia can also be made by examining expression and/or composition of an NRG1AG1 polypeptide, by a variety of methods, including enzyme linked immunosorbent assays (ELISAs), Western blots, immunoprecipitations and immunofluorescence. A test sample from an individual is assessed for the presence of an alteration in the expression and/or an alteration in composition of the polypeptide encoded by NRG1AG1, or for the presence of a particular splicing variant encoded by NRG1AG1. An alteration in expression of a polypeptide encoded by NRG1AG1 can be, for example, an alteration in the quantitative polypeptide expression (i.e., the amount of polypeptide produced); an alteration in the composition of a polypeptide encoded by NRG1AG1 is an alteration in the qualitative polypeptide expression (e.g., expression of a mutant NRG1AG1 polypeptide or of a different splicing variant). In a preferred embodiment, diagnosis of a susceptibility to schizophrenia is made by detecting a particular splicing variant encoded by NRG1AG1, or a particular pattern of splicing variants.

[0094] Both quantitative and qualitative alterations can also be present. An “alteration” in the polypeptide expression or composition, as used herein, refers to an alteration in expression or composition in a test sample, as compared with the expression or composition of polypeptide by NRG1AG1 in a control sample. A control sample is a sample that corresponds to the test sample (e.g., is from the same type of cells), and is from an individual who is not affected by schizophrenia. An alteration in the expression or composition of the polypeptide in the test sample, as compared with the control sample, is indicative of a susceptibility to schizophrenia. Similarly, the presence of one or more different splicing variants in the test sample, or the presence of significantly different amounts of different splicing variants in the test sample, as compared with the control sample, is indicative of a susceptibility to schizophrenia. Various means of examining expression or composition of the polypeptide encoded by NRG1AG1 can be used, including spectroscopy, colorimetry, electrophoresis, isoelectric focusing, and immunoassays (e.g., David et al., U.S. Pat. No. 4,376,110) such as immunoblotting (see also Current Protocols in Molecular Biology, particularly chapter 10). For example, in one embodiment, an antibody capable of binding to the polypeptide (e.g., as described above), preferably an antibody with a detectable label, can be used. Antibodies can be polyclonal, or more preferably, monoclonal. An intact antibody, or a fragment thereof (e.g., Fab or F(ab′)₂) can be used. The term “labeled”, with regard to the probe or antibody, is intended to encompass direct labeling of the probe or antibody by coupling (i.e., physically linking) a detectable substance to the probe or antibody, as well as indirect labeling of the probe or antibody by reactivity with another reagent that is directly labeled. Examples of indirect labeling include detection of a primary antibody using a fluorescently labeled secondary antibody and end-labeling of a DNA probe with biotin such that it can be detected with fluorescently labeled streptavidin.

[0095] Western blotting analysis, using an antibody as described above that specifically binds to a polypeptide encoded by a mutant NRG1AG1, or an antibody that specifically binds to a polypeptide encoded by a non-mutant gene, or an antibody that specifically binds to a particular splicing variant encoded by NRG1AG1, can be used to identify the presence in a test sample of a particular splicing variant or of a polypeptide encoded by a polymorphic or mutant NRG1AG1, or the absence in a test sample of a particular splicing variant or of a polypeptide encoded by a non-polymorphic or non-mutant gene. The presence of a polypeptide encoded by a polymorphic or mutant gene, or the absence of a polypeptide encoded by a non-polymorphic or non-mutant gene, is diagnostic for a susceptibility to schizophrenia, as is the presence (or absence) of particular splicing variants encoded by the NRG1AG1 gene.

[0096] In one embodiment of this method, the level or amount of polypeptide encoded by NRG1AG1 in a test sample is compared with the level or amount of the polypeptide encoded by NRG1AG1 in a control sample. A level or amount of the polypeptide in the test sample that is higher or lower than the level or amount of the polypeptide in the control sample, such that the difference is statistically significant, is indicative of an alteration in the expression of the polypeptide encoded by NRG1AG1, and is diagnostic for a susceptibility to schizophrenia. Alternatively, the composition of the polypeptide encoded by NRG1AG1 in a test sample is compared with the composition of the polypeptide encoded by NRG1AG1 in a control sample. A difference in the composition of the polypeptide in the test sample, as compared with the composition of the polypeptide in the control sample (e.g., the presence of different splicing variants), is diagnostic for a susceptibility to schizophrenia. In another embodiment, both the level or amount and the composition of the polypeptide can be assessed in the test sample and in the control sample. A difference in the amount or level of the polypeptide in the test sample, compared to the control sample; a difference in composition in the test sample, compared to the control sample; or both a difference in the amount or level, and a difference in the composition, is indicative of a susceptibility to schizophrenia.

[0097] Kits (e.g., reagent kits) useful in the methods of diagnosis comprise components useful in any of the methods described herein, including for example, hybridization probes or primers as described herein (e.g., labeled probes or primers), reagents for detection of labeled molecules, restriction enzymes (e.g., for RFLP analysis), allele-specific oligonucleotides, antibodies which bind to mutant or to non-mutant (native) NRG1AG1 polypeptide (e.g., to SEQ ID NO: 6, 7, 8, and/or 9), means for amplification of nucleic acids comprising NRG1AG1, or means for analyzing the nucleic acid sequence of NRG1AG1 or for analyzing the amino acid sequence of an NRG1 AG1 polypeptide, etc.

[0098] Screening Assays and Agents Identified Thereby

[0099] The invention provides methods (also referred to herein as “screening assays”) for identifying the presence of a nucleotide that hybridizes to a nucleic acid of the invention, as well as for identifying the presence of a polypeptide encoded by a nucleic acid of the invention. In one embodiment, the presence (or absence) of a nucleic acid molecule of interest (e.g., a nucleic acid that has significant homology with a nucleic acid of the invention) in a sample can be assessed by contacting the sample with a nucleic acid comprising a nucleic acid of the invention (e.g., a nucleic acid having the sequence of SEQ ID NO: 1 or the complement of SEQ ID NO: 1, or a nucleic acid encoding an amino acid having the sequence of SEQ ID NO: 6, 7, 8, or 9, or a fragment or variant of such nucleic acids), under high stringency conditions as described above, and then assessing the sample for the presence (or absence) of hybridization. In a preferred embodiment, the high stringency conditions are conditions appropriate for selective hybridization. In another embodiment, a sample containing the nucleic acid molecule of interest is contacted with a nucleic acid containing a contiguous nucleotide sequence (e.g., a primer or a probe as described above) that is at least partially complementary to a part of the nucleic acid molecule of interest (e.g., a neuregulin 1-associated gene 1 nucleic acid), and the contacted sample is assessed for the presence or absence of hybridization. In a preferred embodiment, the nucleic acid containing a contiguous nucleotide sequence is completely complementary to a part of the nucleic acid molecule of interest.

[0100] In any of these embodiment, all or a portion of the nucleic acid of interest can be subjected to amplification prior to performing the hybridization.

[0101] In another embodiment, the presence (or absence) of a polypeptide of interest, such as a polypeptide of the invention or a fragment or variant thereof, in a sample can be assessed by contacting the sample with an antibody that specifically hybridizes to the polypeptide of interest (e.g., an antibody such as those described above), and then assessing the sample for the presence (or absence) of binding of the antibody to the polypeptide of interest.

[0102] In another embodiment, the invention provides methods for identifying agents (e.g., fusion proteins, polypeptides, peptidomimetics, prodrugs, receptors, binding agents, antibodies, small molecules or other drugs, or ribozymes) which alter (e.g., increase or decrease) the activity of the polypeptides described herein, or which otherwise interact with the polypeptides herein. For example, such agents can be agents which bind to polypeptides described herein (e.g., NGR1AG1 binding agents); which have a stimulatory or inhibitory effect on, for example, activity of polypeptides of the invention; which change (e.g., enhance or inhibit) the ability of the polypeptides of the invention to interact with NRG1AG1 binding agents (e.g., receptors or other binding agents); or which alter posttranslational processing of the NRG1AG1 polypeptide (e.g., agents that alter proteolytic processing to direct the polypeptide from where it is normally synthesized to another location in the cell, such as the cell surface; agents that alter proteolytic processing such that more active polypeptide is released from the cell, etc.).

[0103] In one embodiment, the invention provides assays for screening candidate or test agents that bind to or modulate the activity of polypeptides described herein (or biologically active portion(s) thereof), as well as agents identifiable by the assays. Test agents can be obtained using any of the numerous approaches in combinatorial library methods known in the art, including: biological libraries; spatially addressable parallel solid phase or solution phase libraries; synthetic library methods requiring deconvolution; the ‘one-bead one-compound’ library method; and synthetic library methods using affinity chromatography selection. The biological library approach is limited to polypeptide libraries, while the other four approaches are applicable to polypeptide, non-peptide oligomer or small molecule libraries of compounds (Lam, K. S. (1997) Anticancer Drug Des., 12:145).

[0104] In one embodiment, to identify agents which alter the activity of an NRG1AG1 polypeptide, a cell, cell lysate, or solution containing or expressing an NRG1AG1 polypeptide (e.g., SEQ ID NO: 6, 7, 8, or 9, or another splicing variant encoded by NRG1AG1), or a fragment or derivative thereof (as described above), can be contacted with an agent to be tested; alternatively, the polypeptide can be contacted directly with the agent to be tested. The level (amount) of NRG1AG1 activity is assessed (e.g., the level (amount) of NRG1AG1 activity is measured, either directly or indirectly), and is compared with the level of activity in a control (i.e., the level of activity of the NRG1AG1 polypeptide or fragment or derivative thereof in the absence of the agent to be tested). If the level of the activity in the presence of the agent differs, by an amount that is statistically significant, from the level of the activity in the absence of the agent, then the agent is an agent that alters the activity of NRG1AG1 polypeptide. An increase in the level of NRG1AG1 activity relative to a control, indicates that the agent is an agent that enhances (is an agonist of) NRG1AG1 activity. Similarly, a decrease in the level of NRG1AG1 activity relative to a control, indicates that the agent is an agent that inhibits (is an antagonist of) NRG1AG1 activity. In another embodiment, the level of activity of an NRG1AG1 polypeptide or derivative or fragment thereof in the presence of the agent to be tested, is compared with a control level that has previously been established. A level of the activity in the presence of the agent that differs from the control level by an amount that is statistically significant indicates that the agent alters NRG1AG1 activity.

[0105] The present invention also relates to an assay for identifying agents which alter the expression of the NRG1AG1 gene (e.g., antisense nucleic acids, fusion proteins, polypeptides, peptidomimetics, prodrugs, receptors, binding agents, antibodies, small molecules or other drugs, or ribozyrnes) which alter (e.g., increase or decrease) expression (e.g., transcription or translation) of the gene or which otherwise interact with the nucleic acids described herein, as well as agents identifiable by the assays. For example, a solution containing a nucleic acid encoding NRG1AG1 polypeptide (e.g., NRG1AG1 gene) can be contacted with an agent to be tested. The solution can comprise, for example, cells containing the nucleic acid or cell lysate containing the nucleic acid; alternatively, the solution can be another solution which comprises elements necessary for transcription/translation of the nucleic acid. Cells not suspended in solution can also be employed, if desired. The level and/or pattern of NRG1AG1 expression (e.g., the level and/or pattern of mRNA or of protein expressed, such as the level and/or pattern of different splicing variants) is assessed, and is compared with the level and/or pattern of expression in a control (i.e., the level and/or pattern of the NRG1AG1 expression in the absence of the agent to be tested). If the level and/or pattern in the presence of the agent differs, by an amount or in a manner that is statistically significant, from the level and/or pattern in the absence of the agent, then the agent is an agent that alters the expression of NRG1AG1. Enhancement of NRG1AG1 expression indicates that the agent is an agonist of NRG1AG1 activity. Similarly, inhibition of NRG1AG1 expression indicates that the agent is an antagonist of NRG1AG1 activity. In another embodiment, the level and/or pattern of NRG1AG1 polypeptide(s) (e.g., different splicing variants) in the presence of the agent to be tested, is compared with a control level and/or pattern that has previously been established. A level and/or pattern in the presence of the agent that differs from the control level and/or pattern by an amount or in a manner that is statistically significant indicates that the agent alters NRG1AG1 expression.

[0106] In another embodiment of the invention, agents which alter the expression of the NRG1AG1 gene or which otherwise interact with the nucleic acids described herein, can be identified using a cell, cell lysate, or solution containing a nucleic acid encoding the promoter region of the NRG1AG1 gene operably linked to a reporter gene. After contact with an agent to be tested, the level of expression of the reporter gene (e.g., the level of mRNA or of protein expressed) is assessed, and is compared with the level of expression in a control (i.e., the level of the expression of the reporter gene in the absence of the agent to be tested). If the level in the presence of the agent differs, by an amount or in a manner that is statistically significant, from the level in the absence of the agent, then the agent is an agent that alters the expression of NRG1AG1, as indicated by its ability to alter expression of a gene that is operably linked to the NRG1AG1 gene promoter. Enhancement of the expression of the reporter indicates that the agent is an agonist of NRG1AG1 activity. Similarly, inhibition of the expression of the reporter indicates that the agent is an antagonist of NRG1AG1 activity. In another embodiment, the level of expression of the reporter in the presence of the agent to be tested, is compared with a control level that has previously been established. A level in the presence of the agent that differs from the control level by an amount or in a manner that is statistically significant indicates that the agent alters NRG1AG1 expression.

[0107] Agents which alter the amounts of different splicing variants encoded by NRG1AG1 (e.g., an agent which enhances activity of a first splicing variant, and which inhibits activity of a second splicing variant), as well as agents which are agonists of activity of a first splicing variant and antagonists of activity of a second splicing variant, can easily be identified using these methods described above.

[0108] In other embodiments of the invention, assays can be used to assess the impact of a test agent on the activity of an NRG1AG1 polypeptide in relation to an NRG1AG1 binding agent. For example, a cell that expresses a compound that interacts with NRG1AG1 (herein referred to as a “NRG1AG1 binding agent”, which can be a polypeptide or other molecule that interacts with NRG1AG1, such as a receptor) is contacted with NRG1AG1 in the presence of a test agent, and the ability of the test agent to alter the interaction between NRG1AG1 and the NRG1AG1 binding agent is determined. Alternatively, a cell lysate or a solution containing the NRG1AG1 binding agent, can be used. An agent which binds to NRG1AG1 or the NRG1AG1 binding agent can alter the interaction by interfering with, or enhancing the ability of NRG1AG1 to bind to, associate with, or otherwise interact with the NRG1AG1 binding agent. Determining the ability of the test agent to bind to NRG1AG1 or an NRG1AG1 binding agent can be accomplished, for example, by coupling the test agent with a radioisotope or enzymatic label such that binding of the test agent to the polypeptide can be determined by detecting the labeled with ¹²⁵I, ³⁵S, ¹⁴C, or ³H, either directly or indirectly, and the radioisotope detected by direct counting of radioemmission or by scintillation counting. Alternatively, test agents can be enzymatically labeled with, for example, horseradish peroxidase, alkaline phosphatase, or luciferase, and the enzymatic label detected by determination of conversion of an appropriate substrate to product. It is also within the scope of this invention to determine the ability of a test agent to interact with the polypeptide without the labeling of any of the interactants. For example, a microphysiometer can be used to detect the interaction of a test agent with NRG1AG1 or an NRG1AG1 binding agent without the labeling of either the test agent, NRG1AG1, or the NRG1AG1 binding agent. McConnell, H. M. et al (1992) Science, 257:1906-1912. As used herein, a “microphysiometer” (e.g., Cytosensor™) is an analytical instrument that measures the rate at which a cell acidifies its environment using a light-addressable potentiometric sensor (LAPS). Changes in this acidification rate can be used as an indicator of the interaction between ligand and polypeptide.

[0109] In another embodiment of the invention, assays can be used to identify polypeptides that interact with one or more NRG1AG1 polypeptides, as described herein. For example, a yeast two-hybrid system such as that described by Fields and Song (Fields, S. and Song, O., Nature 340:245-246 (1989)) can be used to identify polypeptides that interact with one or more NRG1AG1 polypeptides. In such a yeast two-hybrid system, vectors are constructed based on the flexibility of a transcription factor which has two functional domains (a DNA binding domain and a transcription activation domain). If the two domains are separated but fused to two different proteins that interact with one another, transcriptional activation can be achieved, and transcription of specific markers (e.g., nutritional markers such as His and Ade, or color markers such as lacZ) can be used to identify the presence of interaction and transcriptional activation. For example, in the methods of the invention, a first vector is used which includes a nucleic acid encoding a DNA binding domain and also an NRG1AG1 polypeptide, splicing variant, or fragment or derivative thereof, and a second vector is used which includes a nucleic acid encoding a transcription activation domain and also a nucleic acid encoding a polypeptide which potentially may interact with the NRG1AG1 polypeptide, splicing variant, or fragment or derivative thereof (e.g., a NRG1AG1 polypeptide binding agent or receptor). Incubation of yeast containing the first vector and the second vector under appropriate conditions (e.g., mating conditions such as used in the Matchmaker™ system from Clontech) allows identification of colonies which express the markers of interest. These colonies can be examined to identify the polypeptide(s) which interact with the NRG1AG1 polypeptide or fragment or derivative thereof. Such polypeptides may be useful as agents which alter the activity of expression of an NRG1AG1 polypeptide, as described above.

[0110] In more than one embodiment of the above assay methods of the present invention, it maybe desirable to immobilize either NRG1AG1, the NRG1AG1 binding agent, or other components of the assay on a solid support, in order to facilitate separation of complexed from uncomplexed forms of one or both of the polypeptides, as well as to accommodate automation of the assay. Binding of a test agent to the polypeptide, or interaction of the polypeptide with a binding agent in the presence and absence of a test agent, can be accomplished in any vessel suitable for containing the reactants. Examples of such vessels include microtitre plates, test tubes, and micro-centrifuge tubes. In one embodiment, a fusion protein (e.g., a glutathione-S-transferase fusion protein) can be provided which adds a domain that allows NRG1AG1 or an NRG1AG1 binding agent to be bound to a matrix or other solid support.

[0111] In another embodiment, modulators of expression of nucleic acid molecules of the invention are identified in a method wherein a cell, cell lysate, or solution containing a nucleic acid encoding NRG1AG1 is contacted with a test agent and the expression of appropriate mNRA or polypeptide (e.g., splicing variant(s)) in the cell, cell lysate, or solution, is determined. The level of expression of appropriate mRNA or polypeptide(s) in the presence of the test agent is compared to the level of expression of mRNA or polypeptide(s) in the absence of the test agent. The test agent can then be identified as a modulator of expression based on this comparison. For example, when expression of mRNA or polypeptide is greater (statistically significantly greater) in the presence of the test agent than in its absence, the test agent is identified as a stimulator or enhancer of the mRNA or polypeptide expression. Alternatively, when expression of the mNRA or polypeptide is less (statistically significantly less) in the presence of the test agent than in its absence, the test agent is identified as an inhibitor of the mRNA or polypeptide expression. The level of mNRA or polypeptide expression in the cells can be determined by methods described herein for detecting mNRA or polypeptide.

[0112] This invention further pertains to novel agents identified by the above-described screening assays. Accordingly, it is within the scope of this invention to further use an agent identified as described herein in an appropriate animal model. For example, an agent identified as described herein (e.g., a test agent that is a modulating agent, an antisense nucleic acid molecule, a specific antibody, or a polypeptide-binding agent) can be used in an animal model to determine the efficacy, toxicity, or side effects of treatment with such an agent. Alternatively, an agent identified as described herein can be used in an animal model to determine the mechanism of action of such an agent. Furthermore, this invention pertains to uses of novel agents identified by the above-described screening assays for treatments as described herein. In addition, an agent identified as described herein can be used to alter activity of a polypeptide encoded by neuregulin 1-associated gene 1, or to alter expression of neuregulin 1-associated gene 1, by contacting the polypeptide or the gene (or contacting a cell comprising the polypeptide or the gene) with the agent identified as described herein.

[0113] Pharmaceutical Compositions

[0114] The present invention also pertains to pharmaceutical compositions comprising nucleic acids described herein, particularly nucleotides encoding the polypeptides described herein; comprising polypeptides described herein (e.g., one or more of SEQ ID NO: 6, 7, 8, and/or 9, and/or other splicing variants encoded by NRG1AG1); and/or comprising an agent that alters (e.g., enhances or inhibits) NRG1AG1 gene expression or NRG1AG1 polypeptide activity as described herein. For instance, a polypeptide, protein (e.g., an NRG1AG1 receptor), fragment, fusion protein or prodrug thereof, or a nucleotide or nucleic acid construct (vector) comprising a nucleotide of the present invention, an agent that alters NRG1AG1 polypeptide activity, an agent that alters NRG1AG1 gene expression, or an NRG1AG1 binding agent or binding partner, can be formulated with a physiologically acceptable carrier or excipient to prepare a pharmaceutical composition. The carrier and composition can be sterile. The formulation should suit the mode of administration.

[0115] Suitable pharmaceutically acceptable carriers include but are not limited to water, salt solutions (e.g., NaCl), saline, buffered saline, alcohols, glycerol, ethanol, gum arabic, vegetable oils, benzyl alcohols, polyethylene glycols, gelatin, carbohydrates such as lactose, amylose or starch, dextrose, magnesium stearate, talc, silicic acid, viscous paraffin, perfume oil, fatty acid esters, hydroxyrnethylcellulose, polyvinyl pyro-lidone, etc., as well as combinations thereof. The pharmaceutical preparations can, if desired, be mixed with auxiliary agents, e.g., lubricants, preservatives, stabilizers, wetting agents, emulsifiers, salts for influencing osmotic pressure, buffers, coloring, flavoring and/or aromatic substances and the like which do not deleteriously react with the active agents.

[0116] The composition, if desired, can also contain minor amounts of wetting or emulsifying agents, or pH buffering agents. The composition can be a liquid solution, suspension, emulsion, tablet, pill, capsule, sustained release formulation, or powder. The composition can be formulated as a suppository, with traditional binders and carriers such as triglycerides. Oral formulation can include standard carriers such as pharmaceutical grades of mannitol, lactose, starch, magnesium stearate, polyvinyl pyrol-lidone, sodium saccharine, cellulose, magnesium carbonate, etc.

[0117] Methods of introduction of these compositions include, but are not limited to, intradermal, intramuscular, intraperitoneal, intraocular, intravenous, subcutaneous, topical, oral and intranasal. Other suitable methods of introduction can also include gene therapy (as described below), rechargeable or biodegradable devices, particle acceleration devises (“gene guns”) and slow release polymeric devices. The pharmaceutical compositions of this invention can also be administered as part of a combinatorial therapy with other agents.

[0118] The composition can be formulated in accordance with the routine procedures as a pharmaceutical composition adapted for administration to human beings. For example, compositions for intravenous administration typically are solutions in sterile isotonic aqueous buffer. Where necessary, the composition may also include a solubilizing agent and a local anesthetic to ease pain at the site of the injection. Generally, the ingredients are supplied either separately or mixed together in unit dosage form, for example, as a dry lyophilized powder or water free concentrate in a hermetically sealed container such as an ampule or sachette indicating the quantity of active agent. Where the composition is to be administered by infusion, it can be dispensed with an infusion bottle containing sterile pharmaceutical grade water, saline or dextrose/water. Where the composition is administered by injection, an ampule of sterile water for injection or saline can be provided so that the ingredients may be mixed prior to administration.

[0119] For topical application, nonsprayable forms, viscous to semi-solid or solid forms comprising a carrier compatible with topical application and having a dynamic viscosity preferably greater than water, can be employed. Suitable formulations include but are not limited to solutions, suspensions, emulsions, creams, ointments, powders, enemas, lotions, sols, liniments, salves, aerosols, etc., which are, if desired, sterilized or mixed with auxiliary agents, e.g., preservatives, stabilizers, wetting agents, buffers or salts for influencing osmotic pressure, etc. The agent may be incorporated into a cosmetic formulation. For topical application, also suitable are sprayable aerosol preparations wherein the active ingredient, preferably in combination with a solid or liquid inert carrier material, is packaged in a squeeze bottle or in admixture with a pressurized volatile, normally gaseous propellant, e.g., pressurized air.

[0120] Agents described herein can be formulated as neutral or salt forms. Pharmaceutically acceptable salts include those formed with free amino groups such as those derived from hydrochloric, phosphoric, acetic, oxalic, tartaric acids, etc., and those formed with free carboxyl groups such as those derived from sodium, potassium, ammonium, calcium, ferric hydroxides, isopropylamine, triethylamine, 2-ethylamino ethanol, histidine, procaine, etc.

[0121] The agents are administered in a therapeutically effective amount. The amount of agents which will be therapeutically effective in the treatment of a particular disorder or condition will depend on the nature of the disorder or condition, and can be determined by standard clinical techniques. In addition, in vitro or in vivo assays may optionally be employed to help identify optimal dosage ranges. The precise dose to be employed in the formulation will also depend on the route of administration, and the seriousness of the symptoms of schizophrenia, and should be decided according to the judgment of a practitioner and each patient's circumstances. Effective doses may be extrapolated from dose-response curves derived from in vitro or animal model test systems.

[0122] The invention also provides a pharmaceutical pack or kit comprising one or more containers filled with one or more of the ingredients of the pharmaceutical compositions of the invention. Optionally associated with such container(s) can be a notice in the form prescribed by a governmental agency regulating the manufacture, use or sale of pharmaceuticals or biological products, which notice reflects approval by the agency of manufacture, use of sale for human administration. The pack or kit can be labeled with information regarding mode of administration, sequence of drug administration (e.g., separately, sequentially or concurrently), or the like. The pack or kit may also include means for reminding the patient to take the therapy. The pack or kit can be a single unit dosage of the combination therapy or it can be a plurality of unit dosages. In particular, the agents can be separated, mixed together in any combination, present in a single vial or tablet. Agents assembled in a blister pack or other dispensing means is preferred. For the purpose of this invention, unit dosage is intended to mean a dosage that is dependent on the individual pharmacodynamics of each agent and administered in FDA approved dosages in standard time courses.

[0123] Methods of Therapy

[0124] The present invention also pertains to methods of treatment (prophylactic and/or therapeutic) for schizophrenia, using an NRG1AG1 therapeutic agent. An “NRG1AG1 therapeutic agent” is an agent that alters (e.g., enhances or inhibits) NRG1AG1 polypeptide activity and/or NRG1AG1 gene expression, as described herein (e.g., an NRG1AG1 agonist or antagonist). NRG1AG1 therapeutic agents can alter NRG1AG1 polypeptide activity or gene expression by a variety of means, such as, for example, by providing additional NRG1AG1 polypeptide or by upregulating the transcription or translation of the NRG1AG1 gene; by altering posttranslational processing of the NRG1AG1 polypeptide; by altering transcription of NRG1AG1 splicing variants; or by interfering with NRG1AG1 polypeptide activity (e.g., by binding to an NRG1AG1 polypeptide), or by downregulating the transcription or translation of the NRG1AG1 gene. Representative NRG1AG1 therapeutic agents include the following:

[0125] nucleic acids or fragments or derivatives thereof described herein, particularly nucleotides encoding the polypeptides described herein and vectors comprising such nucleic acids (e.g., a gene, cDNA, and/or mNRA, such as a nucleic acid encoding an NRG1AG1 polypeptide or active fragment or derivative thereof, or an oligonucleotide; for example, SEQ ID NO: 1 or a nucleic acid encoding SEQ ID NO: 6, 7, 8, or 9, or fragments or derivatives thereof);

[0126] polypeptides described herein (e.g., one or more of SEQ ID NO: 6, 7, 8, and/or 9, and/or other splicing variants encoded by NRG1AG1, or fragments or derivatives thereof);

[0127] other polypeptides (e.g., NRG1AG1 receptors); NRG1AG1 binding agents; peptidomimetics; fusion proteins or prodrugs thereof, antibodies (e.g., an antibody to a mutant NRG1AG1 polypeptide, or an antibody to a non-mutant NRG1AG1 polypeptide, or an antibody to a particular splicing variant encoded by NRG1AG1, as described above); ribozymes; other small molecules;

[0128] and other agents that alter (e.g., enhance or inhibit) NRG1AG1 gene expression or polypeptide activity, that alter posttranslational processing of the NRG1AG1 polypeptide, or that regulate transcription of NRG1AG1 splicing variants (e.g., agents that affect which splicing variants are expressed, or that affect the amount of each splicing variant that is expressed).

[0129] In a preferred embodiment, the NRG1AG1 therapeutic agent is a nucleic acid encoding one or more NRG1AG1 polypeptides (e.g., encoding SEQ ID NO: 6, 7, 8, and/or 9, or a fragment or derivative thereof); in another preferred embodiment, the NRG1AG1 therapeutic agent is a nucleic acid comprising a fragment of the NRG1AG1 gene (e.g., comprising a fragment of SEQ ID NO: 1, or a derivative thereof), such as a regulatory region of the NRG1AG1 gene; in yet another preferred embodiment, the NRG1AG1 therapeutic agent is a nucleic acid comprising the NRG1AG1 gene regulatory region and also a nucleic acid encoding one or more NRG1AG1 polypeptides (or fragments or derivatives thereof).

[0130] More than one NRG1AG1 therapeutic agent can be used concurrently, if desired.

[0131] The NRG1AG1 therapeutic agent that is a nucleic acid is used in the treatment of schizophrenia. The term, “treatment” as used herein, refers not only to ameliorating symptoms associated with the disease, but also preventing or delaying the onset of the disease, and also lessening the severity or frequency of symptoms of the disease. The therapy is designed to alter (e.g., inhibit or enhance), replace or supplement activity of an NRG1AG1 polypeptide in an individual. For example, an NRG1AG1 therapeutic agent can be administered in order to upregulate or increase the expression or availability of the NRG1AG1 gene or of specific splicing variants of NRG1AG1, or, conversely, to downregulate or decrease the expression or availability of the NRG1AG1 gene or specific splicing variants of NRG1AG1. Upregulation or increasing expression or availability of a native NRG1AG1 gene or of a particular splicing variant could interfere with or compensate for the expression or activity of a defective gene or another splicing variant; downregulation or decreasing expression or availability of a native NRG1AG1 gene or of a particular splicing variant could minimize the expression or activity of a defective gene or the particular splicing variant and thereby minimize the impact of the defective gene or the particular splicing variant.

[0132] The NRG1AG1therapeutic agent(s) are administered in a therapeutically effective amount (i.e., an amount that is sufficient to treat the disease, such as by ameliorating symptoms associated with the disease, preventing or delaying the onset of the disease, and/or also lessening the severity or frequency of symptoms of the disease). The amount which will be therapeutically effective in the treatment of a particular individual's disorder or condition will depend on the symptoms and severity of the disease, and can be determined by standard clinical techniques. In addition, in vitro or in vivo assays may optionally be employed to help identify optimal dosage ranges. The precise dose to be employed in the formulation will also depend on the route of administration, and the seriousness of the disease or disorder, and should be decided according to the judgment of a practitioner and each patient's circumstances. Effective doses may be extrapolated from dose-response curves derived from in vitro or animal model test systems.

[0133] In one embodiment, a nucleic acid of the invention (e.g., a nucleic acid encoding an NRG1AG1 polypeptide, such as SEQ ID NO: 1; or another nucleic acid that encodes an NRG1AG1 polypeptide or a splicing variant, derivative or fragment thereof, such as a nucleic acid encoding SEQ ID NO: 6, 7, 8, and/or 9) can be used, either alone or in a pharmaceutical composition as described above. For example, NRG1AG1 or a cDNA encoding the NRG1AG1 polypeptide, either by itself or included within a vector, can be introduced into cells (either in vitro or in vivo) such that the cells produce native NRG1AG1 polypeptide. If necessary, cells that have been transformed with the gene or cDNA or a vector comprising the gene or CDNA can be introduced (or re-introduced) into an individual affected with the disease. Thus, cells which, in nature, lack native NRG1AG1 expression and activity, or have mutant NRG1AG1 expression and activity, or have expression of a disease-associated NRG1AG1 splicing variant, can be engineered to express NRG1AG1 polypeptide or an active fragment of the NRG1AG1 polypeptide (or a different variant of NRG1AG1 polypeptide). In a preferred embodiment, nucleic acid encoding the NRG1AG1 polypeptide, or an active fragment or derivative thereof, can be introduced into an expression vector, such as a viral vector, and the vector can be introduced into appropriate cells in an animal. Other gene transfer systems, including viral and nonviral transfer systems, can be used. Alternatively, nonviral gene transfer methods, such as calcium phosphate coprecipitation, mechanical techniques (e.g., microinjection); membrane fusion-mediated transfer via liposomes; or direct DNA uptake, can also be used.

[0134] Alternatively, in another embodiment of the invention, a nucleic acid of the invention; a nucleic acid complementary to a nucleic acid of the invention; or a portion of such a nucleic acid (e.g., an oligonucleotide as described below), can be used in “antisense” therapy, in which a nucleic acid (e.g., an oligonucleotide) which specifically hybridizes to the mRNA and/or genomic DNA of NRG1AG1 is administered or generated in situ. The antisense nucleic acid that specifically hybridizes to the mRNA and/or DNA inhibits expression of the NRG1AG1 polypeptide, e.g., by inhibiting translation and/or transcription. Binding of the antisense nucleic acid can be by conventional base pair complementarity, or, for example, in the case of binding to DNA duplexes, through specific interaction in the major groove of the double helix.

[0135] An antisense construct of the present invention can be delivered, for example, as an expression plasmid as described above. When the plasmid is transcribed in the cell, it produces RNA which is complementary to a portion of the rnRNA and/or DNA which encodes NRG1AG1 polypeptide. Alternatively, the antisense construct can be an oligonucleotide probe which is generated ex vivo and introduced into cells; it then inhibits expression by hybridizing with the mNRA and/or genomic DNA of NRG1AG1. In one embodiment, the oligonucleotide probes are modified oligonucleotides which are resistant to endogenous nucleases, e.g. exonucleases and/or endonucleases, thereby rendering them stable in vivo. Exemplary nucleic acid molecules for use as antisense oligonucleotides are phosphoramidate, phosphothioate and methylphosphonate analogs of DNA (see also U.S. Pat. Nos. 5,176,996; 5,264,564; and 5,256,775). Additionally, general approaches to constructing oligomers useful in antisense therapy are also described, for example, by Van der Krol et al. ((1988) Biotechniques 6:958-976); and Stein et al. ( (1988) Cancer Res 48:2659-2668). With respect to antisense DNA, oligodeoxyribonucleotides derived from the translation initiation site, e.g. between the −10 and +10 regions of NRG1AG1 sequence, are preferred.

[0136] To perform antisense therapy, oligonucleotides (mNRA, cDNA or DNA) are designed that are complementary to mNRA encoding NRG1AG1. The antisense oligonucleotides bind to NRG1AG1 mRNA transcripts and prevent translation. Absolute complementarity, although preferred, is not required. a sequence “complementary” to a portion of an RNA, as referred to herein, indicates that a sequence has sufficient complementarity to be able to hybridize with the RNA, forming a stable duplex; in the case of double-stranded antisense nucleic acids, a single strand of the duplex DNA may thus be tested, or triplex formation may be assayed. The ability to hybridize will depend on both the degree of complementarity and the length of the antisense nucleic acid, as described in detail above. Generally, the longer the hybridizing nucleic acid, the more base mismatches with an RNA it may contain and still form a stable duplex (or triplex, as the case may be). One skilled in the art can ascertain a tolerable degree of mismatch by use of standard procedures.

[0137] The oligonucleotides used in antisense therapy can be DNA, RNA, or chimeric mixtures or derivatives or modified versions thereof, single-stranded or double-stranded. The oligonucleotides can be modified at the base moiety, sugar moiety, or phosphate backbone, for example, to improve stability of the molecule, hybridization, etc. The oligonucleotides can include other appended groups such as peptides (e.g. for targeting host cell receptors in vivo), or agents facilitating transport across the cell membrane (see, e.g., Letsinger et al. (1989) Proc. Natl. Acad. Sci. USA 86:6553-6556; Lemaitre et al, (1987), Proc. Natl. Acad Sci. USA 84:648-652; PCT International Publication No. W088/09810) or the blood-brain barrier (see, e.g., PCT International Publication No. W089/10134), or hybridization-triggered cleavage agents (see, e.g., Krol et al. (1988) BioTechniques 6:958-976) or intercalating agents. (See, e.g., Zon, (1988), Pharm. Res. 5:539-549). To this end, the oligonucleotide maybe conjugated to another molecule (e.g., a peptide, hybridization triggered cross-linking agent, transport agent, hybridization-triggered cleavage agent).

[0138] The antisense molecules are delivered to cells which express NRG1AG1 in vivo. A number of methods can be used for delivering antisense DNA or RNA to cells; e.g., antisense molecules can be injected directly into the tissue site, or modified antisense molecules, designed to target the desired cells (e.g., antisense linked to peptides or antibodies that specifically bind receptors or antigens expressed on the target cell surface) can be administered systematically. Alternatively, in a preferred embodiment, a recombinant DNA construct is utilized in which the antisense oligonucleotide is placed under the control of a strong promoter (e.g., pol III or pol II). The use of such a construct to transfect target cells in the patient results in the transcription of sufficient amounts of single stranded RNAs that will form complementary base pairs with the endogenous NRG1AG1 transcripts and thereby prevent translation of the NRG1AG1 mRNA. For example, a vector can be introduced in vivo such that it is taken up by a cell and directs the transcription of an antisense RNA. Such a vector can remain episomal or become chromosomally integrated, as long as it can be transcribed to produce the desired antisense RNA. Such vectors can be constructed by recombinant DNA technology methods standard in the art and described above. For example, a plasmid, cosmid, YAC or viral vector can be used to prepare the recombinant DNA construct which can be introduced directly into the tissue site. Alternatively, viral vectors can be used which selectively infect the desired tissue, in which case administration may be accomplished by another route (e.g., systematically).

[0139] Endogenous NRG1AG1 expression can also be reduced by inactivating or “knocking out” NRG1AG1 or its promoter using targeted homologous recombination (e.g., see Smithies et al. (1985) Nature 317:230-234; Thomas & Capecchi (1987) Cell 51:503-512; Thompson et al. (1989) Cell 5:313-321). For example, a mutant, non-functional NRG1AG1 (or a completely unrelated DNA sequence) flanked by DNA homologous to the endogenous NRG1AG1 (either the coding regions or regulatory regions of NRG1AG1) can be used, with or without a selectable marker and/or a negative selectable marker, to transfect cells that express NRG1AG1 in vivo. Insertion of the DNA construct, via targeted homologous recombination, results in inactivation of NRG1AG1. The recombinant DNA constructs can be directly administered or targeted to the required site in vivo using appropriate vectors, as described above. Alternatively, expression of non-mutant NRG1AG1 can be increased using a similar method: targeted homologous recombination can be used to insert a DNA construct comprising a non-mutant, functional NRG1AG1 (e.g., a gene having SEQ ID NO: 1), or a portion thereof, in place of a mutant NRG1AG1 in the cell, as described above. In another embodiment, targeted homologous recombination can be used to insert a DNA construct comprising a nucleic acid that encodes an NRG1AG1 polypeptide variant that differs from that present in the cell.

[0140] Alternatively, endogenous NRG1AG1 expression can be reduced by targeting deoxyribonucleotide sequences complementary to the regulatory region of NRG1AG1 (i.e., the NRG1AG1 promoter and/or enhancers) to form triple helical structures that prevent transcription of NRG1AG1 in target cells in the body. (See generally, Helene, C. (1991) Anticancer Drug Des., 6(6):569-84; Helene, C., et al. (1992) Ann, N.Y. Acad. Sci., 660:27-36; and Maher, L. J. (1992) Bioassays 14(12):807-15). Likewise, the antisense constructs described herein, by antagonizing the normal biological activity of one of the NRG1AG1 proteins, can be used in the manipulation of tissue, e.g. tissue differentiation, both in vivo and for ex vivo tissue cultures. Furthermore, the anti-sense techniques (e.g. microinjection of antisense molecules, or transfection with plasmids whose transcripts are anti-sense with regard to an NRG1AG1 mRNA or gene sequence) can be used to investigate role of NRG1AG1 in developmental events, as well as the normal cellular function of NRG1AG1 in adult tissue. Such techniques can be utilized in cell culture, but can also be used in the creation of transgenic animals.

[0141] In yet another embodiment of the invention, other NRG1AG1 therapeutic agents as described herein can also be used in the treatment or prevention of schizophrenia. The therapeutic agents can be delivered in a composition, as described above, or by themselves. They can be administered systemically, or can be targeted to a particular tissue. The therapeutic agents can be produced by a variety of means, including chemical synthesis; recombinant production; in vivo production (e.g., a transgenic animal, such as U.S. Pat. No. 4,873,316 to Meade et al.), for example, and can be isolated using standard means such as those described herein.

[0142] A combination of any of the above methods of treatment (e.g., administration of non-mutant NRG1AG1 polypeptide in conjunction with antisense therapy targeting mutant NRG1AG1 mRNA; administration of a first splicing variant encoded by NRG1AG1 in conjunction with antisense therapy targeting a second splicing variant encoded by NRG1AG1), can also be used.

[0143] The invention will be further described by the following non-limiting examples. The teachings of all publications cited herein are incorporated herein by reference in their entirety.

### EXEMPLIFICATION

### Identification of Gene With Linkage to Schizophrenia

[0144] Patient Population

[0145] The lifetime expectancy of schizophrenia in Iceland is similar to what has been observed in the neighboring countries, 0.6% for males and 0.9% for females. A team of seven psychiatrists who diagnose patients and confirm the diagnosis of previously diagnosed schizophrenics and collect samples was employed. Each psychiatrist interviewed, using the Schedule for Schizophrenia and Affective Disorders, lifetime version (SADS-L) (Endicott, J. and Spitzer, R. L., Arch. Gen. Psychiatry 35:837 (1978)). The information from the SADS-L interviews was then used to classify all cases in accordance with research diagnostic criteria (RDC) and the Diagnosis and Statistical Manual of Mental Disorders, third edition, revised (DMS III-R). Furthermore, the operational criteria OPCRIT checklist for psychotic illness was also used to facilitate a polydiagnostic approach to psychotic illness (McGuffin, P. et al., Arch. Gen Psychiatry 48(8):764-70 (1991)).

[0146] Construction of a BAC Contig

[0147] A BAC (bacterial artificial chromosome) contig for the region of interest was generated using the RCPI11 Human BAC library (Pieter dejong, Roswell Park). BACs were identified by hybridization using available STS markers and microsatellite markers in the region, followed by successive rounds of hybridization using markers designed from BAC end sequences. Hybridization results were confirmed and the order of the BACs determined by PCR using all available markers in the region. The primary goal was to achieve a high resolution ordering of the microsatellite markers.

[0148] Search for New Microsatellite Markers

[0149] BACs were shotgun cloned and gridded onto membranes. Clones containing microsatellite repeats were identified by hybridization with oligonucleotide probes consisting of microsatellite repeat sequences. Positive clones were analyzed by sequencing and primers designed to amplify the microsatellites.

[0150] DNA Sequencing

[0151] Nine BACs, covering the minimum tiling path of the region of interest, were analyzed by shotgun cloning and sequencing. Dye terminator (ABI PRISM BigDye™) chemistry was used for fluorescent automated DNA sequencing. ABI prism 377 sequencers were used to collect data and the Phred/Phrap/Consed software package in combination with the Polyphred software used to assemble sequences.

[0152] Search for Exons in Sequence Databases

[0153] Exons/Genes were Searched for by BLAST Alignment to DNA and Protein Databases.

[0154] Search for New Exons in cDNA Libraries

[0155] Both 3′ and 5′ RACE (rapid amplification of cDNA ends) was carried out using the Marathon-ReadyTM cDNA from Clontech laboratories Inc and cDNA libraries made at deCODE genetics. cDNA libraries from whole brain, fetal brain and testis were used.

[0156] Search for New Exons Using Exon Prediction Tools

[0157] Gene miner software (deCODE genetics) was used to predict where exons were in our 1.5 Mb sequence. Primers for amplifying these candidate exons from cDNA libraries were designed, touch down PCRs were carried out, and the products were verified by sequencing.

[0158] Trapping Exons

[0159] Exons were “trapped” by using the Exon trapping kit from Live technologies. Primers were designed for amplifying these candidate exons from cDNA libraries, touch down PCRs were carried out, and the products were verified by sequencing.

[0160] Genome-Wide Scan

[0161] Samples from affected individuals related within 6 meiotic events, 260 affected individuals and 334 associated relatives, have been genotyped using a marker set of 950 microsatellite markers. One locus, 8p21-8p11, was reexamined with additional 150 follow-up markers. In addition to the 260 affected individuals and their relatives in the genome wide scan, 132 affected individuals and 147 available relatives were also genotyped using the 150 microsatellite markers for the 8p21-11 locus.

[0162] Statistical Analysis

[0163] A linkage analysis was performed with the Allegro software. FIG. 1 displays the results for the Allele-Sharing Model using the CS affected pedigree (158 affected individuals, maximum distance of 5 meiotic events between affected individuals).

[0164] Physical Mapping of the Probable Schizophrenic Locus (Locus on 8p21-11)

[0165] The most significant locus that was found, with a maximum LOD score near 3, was physically mapped using bacterial artificial chromosomes (BACs). Initially the locus was wide, around 30 cM. Only a small fraction of this region had been sequenced previously, with the total cumulative number of bases of around 5 Mb. The published order of markers in the region was not correct and most of the polymorphic markers known in this region had not been radiation hybrid mapped. The primary goal with the BAC map was to achieve a high-resolution ordering (100 to 150 kb) of all polymorphic markers in this region and search for new polymorphic markers

[0166] By screening BAC libraries with primers from the region, 3000 BACs were retrieved by hybridization and PCR methods. Contig mapping was performed; 940 of these clones were assigned by PCR and hybridization to contigs. In addition, 252 additional BACs were assigned to contigs based on fingerprint analysis ( a total of 1192 BAC clones have been assigned to contigs). After correcting the marker order the maximum lod score is 3.1 (FIG. 1). The order of 534 markers in the 30 cM BAC area covered by the BAC contig has now been determined. The physical map has allowed the ordering and placement of polymorphic microsatellite markers and STS markers. BACs were subcloned from the BAC contig and searched for new microsatellites by hybridization. Samples were genotyped using, on average, a polymorphic microsatellite marker every 0.17 cM throughout the locus. Microsatellites are set forth in Appendix II.

[0167] As a result of the physical mapping effort the locus was narrowed to approximately 20 cM. This 20 cM region was spanned by four big contigs, 2-10 Mb each. The main peak extended over 7 cM and this region resided in one BAC contig. The four contigs were correctly ordered based on data from radiation hybrid mapped markers in these contigs, yeast artificial chromosomes (YAC) maps and by comparing haplotypes within families. Now that the marker order has been corrected, as described herein, the densely mapped markers can be used to reconstruct more correct haplotypes and search for at-risk haplotypes, haplotypes giving substantial overlap between families.

[0168] Identification of at-risk Haplotypes

[0169] Locus 8p21-11

[0170] Using genotypes for the densely mapped markers, haplotypes of the affected individuals were constructed, and candidate at-risk haplotypes which are carried by three or more affected individuals within each individual family were identified. By comparing these candidate haplotypes across families, it was found that some of these haplotypes have substantial overlap (FIG. 2). The core of the haplotype found in affected individuals (6 markers telomeric to D8S1810, 0.3 Mb) was found in 10% of the patients (37 out of 746 chromosomes investigated). In comparison, 3% of controls had this haplotype (6 out of 376). FIG. 2 shows 44 patient haplotypes having a part of this at-risk haplotype. FIG. 3 shows an overview of the order of sequenced BACS and the boundaries for the at-risk haplotypes at locus 8p12.

[0171] The results from the linkage and haplotype analyses strongly suggested the presence of a disease-susceptibility gene residing in a 1.5 Mb segment at 8p12, harboring exons from the gene, neuregulin 1 (NRG1) and from a new gene Neuregulin-1-associated gene 1 (NRG1AG1). The gene for neuregulin 1 (NRG1) is described further in U.S. patent application Ser. No. 09/515,716, attorney docket no. 2345-2004-000, entitled “Human Schizophrenia Gene, ” and filed concurrently with the present application and incorporated herein by reference in its entirety.

[0172] The Sequence of the Candidate Region

[0173] Locus 8p12

[0174] Sequencing of 1.5 Mb of the BAC contig on 8p12 where candidate haplotypes showed substantial overlap between families. This sequence was in one contig and harbors the gene, neuregulin-1-associated gene 1 (NRG1AG1). Eight exons from this gene were identified. The open reading frames showed no homology with other known genes. A depiction of the exons, single nucleotide polymorphisms (SNPs), and exons is presented in FIG. 4. Since this gene is within neuregulin-1 and located within the 1.5 Mb region defined by the at-risk haplotypes, it is a strong candidate gene for susceptibility to schizophrenia.

[0175] Neuregulin 1 (NRG1)

[0176] Neuregulin 1 (also called ARIA, GGF2 and heregulin) are a group of polypeptide factors that arise from alternative RNA splicing of a single gene (Fischbach, G. D. and Rosen, K. M., Annu. Rev. Neurosci. 20:429-458 (1997); Orr-Urtreger, A., et al., Proc. Natl Acad. Sci. USA 90:1746-1750 (1993); see also, Corfas, G. et al., Neuron 14(1):103-15 (1995) and Meyer, D. et al., Development 124(18):3575-86 (1997)). Neuregulin is expressed in many tissues, among others in the central nervous system (see, e.g., Corfas, G. et al., Neuron 14(1):103-115 (1995)). Neuregulin 1 gene is expected to be associated with schizophrenia for many reasons, including its role in the expression of the NMDA receptor, in activation of AChR gene expression as well as activation of epidermal growh factor receptors and GABA(a) receptor subunits, and also its induction of components in a G-protein signaling cascade. For a further discussion of these activities of neuregulin 1, see U.S. patent application Ser. No. 09/515,716, filed concurrently with the present application.

[0177] Neuregulin-1-associated gene 1 (NRG1AG1)

[0178] Neuregulin-1-associated gene 1 is a previously unknown gene. Eight exons were found for this gene (FIG. 4) and four alternatively spliced forms (see Appendix III). The open reading frames did not reveal any homology with known genes. This gene is within NRG1 It is much smaller than NRG1, having 112929 bases in its gene sequence. Not all exons have been found for this gene yet; a 5′ exon is still missing for two of the splice variants. It is likely that this gene is involved in the same processes as neuregulin 1, since it is within that gene and on the same strand.

[0179] This gene was identified by predicting where exons might be located in the 1.5 Mb sequence defined by the at-risk haplotypes. Primers were then designed, and cDNA libraries (Brain) were screened. A BLAST alignment was also carried out, BLASTing the 1.5 Mb sequence against the EST database. Two EST clones were in the EST database overlapping with this gene. IMAGE number and accession numbers for these clones are: IMAGE:727960 1 (AA394309, AA435550) and IMAGE 1643938 (AI027638).

[0180] Mutation Analysis

[0181] Neuregulin-1-associated gene 1 (8p12)

[0182] All eight exons have been searched in 180 patients and 180 control individuals. A number of SNPs have been found (FIG. 4; see also Appendix II). SNPs, deletions and insertions are shown in Appendix II.

[0183] Bacterial Artificial Clones (BACs)

[0184] The BAC clones R-217N4, R-29H12, R-450K14, R-478B14, R-420M9, R-22F19, R-72H22, R-244L21, R-225C17, R-317J8 and R-541C15 are from the RCP111 Human BAC library (Pieter dejong, Roswell Park). The vector used was pBACe3.6. The clones were picked into a 94 well microtiter plate containing LB/chloramphenicol (25 μg/ml)/glycerol (7.5%) and stored at −80° C. after a single colony has been positively identified through sequencing. The clones can then be streaked out on a LB agar plate with the appropriate antibiotic, chloramphenicol (25 μg/ml)/sucrose (5%).

[0185] While this invention has been particularly shown and described with reference to preferred embodiments thereof, it will be understood by those skilled in the art that various changes in form and details may be made therein without departing from the spirit and scope of the invention as defined by the appended claims.

[image]

[image]

[image]

[image]

[image]

[image]

[image]

[image]

[image]

[image]

[image]

[image]

[image]

[image]

[image]

[image]

[image]

[image]

[image]

[image]

[image]

[image]

[image]

[image]

[image]

[image]

[image]

[image]

[image]

[image]

[image]

[image]

[image]

[image]

[image]

[image]

[image]

[image]

[image]

[image]

[image]

[image]

[image]

[image]

[image]

[image]

[image]

[image]

[image]

[image]

[image]

[image]

[image]

[image]

[image]

[image]

[image]

[image]

[image]

[image]

[image]

[image]

[image]

[image]

[image]

[image]

[image]

[image]

[image]

[image]

[image]

[image]

[image]

[image]

[image]

[image]

[image]

[image]

[image]

[image]

[image]

[image]

[image]

[image]

[image]

[image]

[image]

[image]

[image]

[image]

[image]

[image]

[image]

[image]

[image]

[image]

[image]

[image]

[image]

[image]

[image]

[image]

[image]

[image]

[image]

[image]

[image]

[image]

[image]

[image]

[image]

[image]

[image]

[image]

[image]

[image]

[image]

[image]

[image]

[image]

[image]

[image]

[image]

[image]

[image]

[image]

[image]

[image]

[image]

[image]

[image]

[image]

[image]

[image]

[image]

[image]

[image]

[image]

[image]

[image]

[image]

[image]

[image]

[image]

[image]

[image]

[image]

[image]

[image]

[image]

[image]

[image]

[image]

[image]

[image]

[image]

[image]

[image]

[image]

[image]

[image]

[image]

[image]

[image]

[image]

[image]

[image]

[image]

[image]

[image]

[image]

[image]

[image]

[image]

[image]

[image]

[image]

[image]

[image]

[image]

[image]

[image]

[image]

[image]

[image]

[image]

[image]

[image]

[image]

[image]

[image]

[image]

[image]

[image]

[image]

[image]

[image]

[image]

[image]

[image]

[image]

[image]

[image]

[image]

[image]

[image]

[image]

[image]

[image]

[image]

[image]

[image]

[image]

[image]

[image]

[image]

[image]

[image]

[image]

[image]

[image]

[image]

[image]

[image]

[image]

[image]

[image]

[image]

[image]

[image]

[image]

[image]

[image]

[image]

[image]

[image]

[image]

[image]

[image]

[image]

[image]

[image]

[image]

[image]

[image]

[image]

[image]

[image]

[image]

[image]

[image]

[image]

[image]

[image]

[image]

[image]

[image]

[image]

[image]

[image]

[image]

[image]

[image]

[image]

[image]

[image]

[image]

[image]

[image]

[image]

[image]

[image]

[image]

[image]

[image]

[image]

[image]

[image]

[image]

[image]

[image]

[image]

[image]

[image]

[image]

[image]

[image]

[image]

[image]

[image]

[image]

[image]

[image]

[image]

[image]

[image]

[image]

[image]

[image]

[image]

[image]

[image]

[image]

[image]

[image]

[image]

[image]

[image]

[image]

[image]

[image]

[image]

[image]

[image]

[image]

[image]

[image]

[image]

[image]

[image]

[image]

[image]

[image]

[image]

[image]

[image]

[image]

[image]

[image]

[image]

[image]

[image]

[image]

[image]

[image]

[image]

[image]

[image]

[image]

[image]

[image]

[image]

[image]

[image]

[image]

[image]

[image]

[image]

[image]

[image]

[image]

[image]

[image]

[image]

[image]

[image]

[image]

[image]

[image]

[image]

[image]

[image]

[image]

[image]

[image]

[image]

[image]

[image]

[image]

[image]

[image]

[image]

[image]

[image]

[image]

[image]

[image]

[image]

[image]

[image]

[image]

[image]

[image]

[image]

[image]

[image]

[image]

[image]

[image]

[image]

[image]

[image]

[image]

[image]

[image]

[image]

[image]

[image]

[image]

[image]

[image]

[image]

[image]

[image]

[image]

[image]

[image]

[image]

[image]

[image]

[image]

[image]

[image]

[image]

[image]

[image]

[image]

[image]

[image]

[image]

[image]

[image]

[image]

[image]

[image]

[image]

[image]

[image]

[image]

[image]

[image]

[image]

[image]

[image]

[image]

[image]

[image]

[image]

[image]

[image]

[image]

[image]

[image]

[image]

[image]

[image]

[image]

[image]

[image]

[image]

[image]

[image]

[image]

[image]

[image]

[image]

[image]

[image]

[image]

[image]

[image]

[image]

[image]

[image]

[image]

[image]

[image]

[image]

[image]

[image]

[image]

[image]

[image]

[image]

[image]

[image]

[image]

[image]

[image]

[image]

[image]

[image]

[image]

[image]

[image]

[image]

[image]

[image]

[image]

[image]

[image]

[image]

[image]

[image]

[image]

[image]

[image]

[image]

[image]

[image]

[image]

[image]

[image]

[image]

[image]

[image]

[image]

[image]

[image]

[image]

[image]

[image]

[image]

[image]

[image]

[image]

[image]

[image]

[image]

[image]

[image]

[image]

[image]

[image]

[image]

[image]

[image]

[image]

[image]

[image]

[image]

[image]

[image]

[image]

[image]

[image]

[image]

[image]

[image]

[image]

[image]

[image]

[image]

[image]

[image]

[image]

[image]

[image]

[image]

[image]

[image]

[image]

[image]

[image]

[image]

[image]

[image]

[image]

[image]

[image]

[image]

[image]

[image]

[image]

[image]

[image]

[image]

[image]

[image]

[image]

[image]

[image]

[image]

[image]

[image]

[image]

[image]

[image]

[image]

[image]

[image]

[image]

[image]

[image]

[image]

[image]

[image]

[image]

[image]

[image]

[image]

[image]

[image]

[image]

[image]

[image]

[image]

[image]

[image]

[image]

[image]

[image]

[image]

[image]

[image]

[image]

[image]

[image]

[image]

[image]

[image]

[image]

[image]

[image]

[image]

[image]

[image]

[image]

[image]

[image]

[image]

[image]

[image]

[image]

[image]

[image]

[image]

[image]

[image]

[image]

[image]

[image]

[image]

[image]

[image]

[image]

[image]

[image]

[image]

[image]

[image]

[image]

[image]

[image]

[image]

[image]

[image]

[image]

[image]

[image]

[image]

[image]

[image]

[image]

[image]

[image]

[image]

[image]

[image]

[image]

[image]

[image]

[image]

[image]

[image]

[image]

[image]

[image]

[image]

[image]

The application's sequence listing, which the Patent Office published only in electronic form, follows.

SEQUENCE LISTING (1531 sequences)

SEQ ID NO: 1 - DNA, 1503841 bp, Homo sapiens
  misc_feature (1)...(1531): r=g or a
  misc_feature (1)...(1531): y=t/u or c
  misc_feature (1)...(1531): m=a or c
  misc_feature (1)...(1531): k=g or t/u
  misc_feature (1)...(1531): s=g or c
  misc_feature (1)...(1531): w=a or t/u
  misc_feature (1)...(1531): b=g or c or t/u
  misc_feature (1)...(1531): d=a or g or t/u
  misc_feature (1)...(1531): h=a or c or t/u
  misc_feature (1)...(1531): v=a or g or c
  misc_feature (1)...(1531): n=a or g or c or t/u
caagcactttataccactttttataaaataagccctcactttcattacattatttaactygtatttctgccttgtgttatagatagaaagtatattattatttctactttatagctgaagaaactgagtccaaaatgggtagagcaactggcactaaagatcacctagccagtccgagwtcacacagtcagtattaggactggggccttgtgccttccagtgcagggtcccttacaccagtcatgacatagatgcccagatcatgcatgacttgatgtaaaaacaacaatttttgttgtcccagtttgagtccttataaatttcccctgtcaaagaaataaacatgcaactctcagaaattatcttttatggagcttttaaaggccactttgccaargggagctatatarccatgacataaacatgaagatggattgacagaaaatactctttcacaggctggaggaaatattgggggaaagaaattttctcagactgcccttccaacgtggcatggatcatggaggtcagcttttctagcttgtgcccagaggtctgtctacctcagctgtgtcttgtgattgataggaggatacagtctcccagggtgtgatttaaggtggagcttataggtctacaaagctcaagctctwatcaagctactatggcatgatagtacaattataaagaaagtagactagtttctataagctgtgtataaaaccaggcccaccctaacatttgcagggcctaggccaagagtgtatgtagagtctcatataccgtatgtctaaatatttcaaagttataaaccaagaagggcctgtggcccaaactgtgttcccaccctaagcctggtagaggcttctcacaggtgtccttgggagtccctccaggaccagccctgctgcttgccagtctgcatggtcacctggatgtgctgagtcaaaggcaggtggagctgggtgaaagtctgtggttttcagtgaggactggagattctcaaatctgggattgggaactgactcagtcaagcgcctcaaggagctagggtgctccttgagcaggttcctctcctccttatttcaatttgctgattaagaacttctagacagttctaagcccctttcaaacaacacacgtttttagcaaatgagaagaagaaagcttggtcatgttagaaatagtcctgtccagacacacacttcagagcaatctggaatggccattccccaagcatgggctgcaattcctttctcccctgtgtctccctaacgcccacacccactcatcagctcttagttcagcacactggcctgtgggtccgagtttggtgtgtgccgcatccctctcctataaactctttttgctcaataaattactgaatcttcaaaagaaaaatttttaaataagaccaaaaccacaaaacaaagcaaacaacagtgacctggtattttggcattcattttgtgtggggccctctaaagcagagggtcctggaggagtctcttcagtccaatggctgaattactccaagactctttcatacaaaagttagctgggcatggtggcatgcgcctgtagtcccagctacttgggagactgaggcgggagaatcacttgaacctgggaggcggaggttgcagtgagccaagattgtgtcattgccctytagcctgggtgacagagcaagactccatctcaaaaaacaaaacaaaacaaaacaaaaaaaactctttctttactttataaccatatggcaggacatctcagttcatctatgacctgtggttttaaagtaaattctgtttaaagttatctttaaaatagctttatttttgttaaaatagagccatatcttcatctgcgggaaatcatattgactccatgataagctatattctggaaaatagtcagtgtgctgacgattgctacctgtgagtagctcacccaacccayaggcaaagtagcaaagagagaggcatggcaacccccaacgtgagaggcttgtagacaacccacagttctagcagatgtcagtgcaacggggcaaatttcatccccctcagagcatggctctgggcaccactggacacatctgtttcaggataatttgaagtccagttgttcagacagagttgatcttaagaccatggtggctactgctgaattttttcagataaagttagtaaaatccgaagttcacccaggtggttgatggcaatatgaactctatataatactgtctgatgccaagtatcttagtcaactcaggctgccataacagaataccacagaccaggtggtttaaacagcagatatttacctttcacagctctggaaactgggaagtctgggattaagctgccagcatggtcaggttctggtgaggggtcacctcttggcttgcaggtgtccaccttcttgccgtgtgctgtgtgtggtggagagatctctccttacragggccctgattccatcatgagcccatctaaccatgattacctcccagaagccccacctccaaataccatcccattgggggttagggtttcaacatatgaattttgagaggacacagacattcagtccataacaccaaatctgtattcatcctagttcagcacagagcagaacctatgtttacccaatatcctttgaatactagttctgaccatagcctttgtaatttaaaagctctacagtcattttttttgaattataaatgcaatacacacttttactagaaaataggaaaaaattaaataaaacttatccataattccaccaatttgagactaacagttggtttcttttcttccaaacacatatgtgtatataaatatacgcatatatacttccataaacaacatatttttaaaatgaaattagattcatactgttgaggttttttttttttttttaatcttacttctttcaacatgctttaaatagtaagcttttcccttgtcctaaaaaaatttttacttcttcactttttaatgttttggctgtctggaccataaattatctgcatttatatcttatattatttagaaaatatatatctgcttttaatcccctcgtttttaacttttaatttttcaaatggattttaaaagctgtgtttttgctaagtatcaactcaagaaggaaatgttctcttttgagttctacctttgctagatgaagaatgtggcccacctctcctctcactaccccttcatgtcaaagccttggatttgtggggctttggatgttgtgcttattttttgaaataaaaataaatgaacaatttcctatatatagaaaattattatgcatataaaccatgcatttttatcacaaaggattttagttggcagttttctgcaatatactagttattttcacaaggtggaaatccagaggattgattgacttgaatcctgaatccctacatcctctatcagcacccagtgttcttgcaggttttcaaagaaactctccctgctattaggctaaggctttagattcaaatactcatagagaatcttagccctaggctaaaaatagggcccacctttagcatgggccgtattttgttccttcttccatggatatgtctggagcagtcttctttagttctgattcctggccaacatcatagaaagatgaatcctttaggaagtgcaccaaagaaggagcacttttgcataatgactagagctcctcatctctgccaaccaccccaagtctctctctctttttattttttatttttttgctgggcccaaccccttgtttctgtttgagcaaaatgcataaacttagaacagacattcttaagccttgtgctgtgttacactgttgtactacgagcatttgacttatttttgctggaaccatgaatatgtcttgaaaggctgctgtctgctggatgaaacactgagctaagcaggtcatacaacaggctgtagagtaggagctccaacttggaactaaggggcataaagtgtggtaccctgcccactggtgtcaaagaaaaattaagcattcaaaggaacatgtgagggctttgctttctgacagtgtggttctggctatactgagggttatcttttaaaactagcatggtatagaagagtgacctcatggacagtgcagtaactagatgcttccaaagggtgtgagatgctgcttttctctagtagtatttgtgttataattattcctggcttgtttgcctttagtatttttttgactgccaaaaattatagcattcaaaaaatgtgccacaaaaacaacaaagttgacaactactgatctggaacctttctaaatgtgaccagtcagagaccatagccaatattttctattgtctatagaatgggatgggcagagaaaacagctaacaaaaaaggaaaaaacaacccaaaatatttcatggtttcagctttattagcmtaacagtcaagttgttytggttccacgacttttaaattaagcgaaggagaactctcccatcaataggttcattgtgatgccaaactttacatattttggaaaaacattcatttacccgccaggcaagctgcctsctctcttagagttcgtggtagggaactataagcataaagacctttctgaggaggttttccttattttattgactgcctcatatatttacaacttcccaatttattttttcagactgctaactcctgtgttcctagattcccatttttcaattgattgtgggctttttctagggttacagatttaacttccatgcaagtggtggggtgtcccacatcaggaccttgtatattctaactctaaacactcttcgtatttctgtatgtctccagaccagcaaacttacacagtcttcttgttattgatatttgccttttgtgtgttccaagagcatatccctaagtgcacagaagatgtgatttttcttctgtcattgtctccaaaacctcttctttcctgcatctgaagtccccagaccctggataagatttctactttgttgcactgaggaacagaacttttccctttttatttacagaagggtctggctcttatcacctctgaatagcatgccattctcttagcctcatctaagaaacagactgtaggggaagagaagatctagaatgttggtcaccaaccaatggcagacattatcaggtaagaaacctgcccacccaaactctggaccctaatatgcaagtctaactagttccataaaaccaatccctgctaaccccacaaacaggttgcctatagccttacaagtggcctccttggtttttagtggcatagtgcaggtgagccatatattatgcttctcaatttatttccattggtcagaaaactggtaaaaaattccttttcaatggtatagttttcgaatctcaacagagacttctttggtcttagtgatgagtcttcatggtattttggcttgcaygtagtaacaataatcaagtcattcacccagtgcaagattttggtgtctttatttttaactatttgtattgtgcattatcacatagataaccatttgttttgctggtctcattgctcacgtagaagtctgaatataattctttctcagagtgtgggaaatcatggattgatattcttagtttttgatgtagtgctttttatttttaaccttcttagacaatttgtgagcaaggaagtcaggaactgtgagccacctgccatcttaatttgacatctagtctcactactttcaagcacctccacttcaaaatactcttacaagtgaatcaccattgttaaatggatctttgaaggaattttgacaaccagactgaaaacaatctagacatcttagatatttgtggcttcacagaaaataaaataaaacaacccwtttcagcatcaagttatattttccatagctacagaatctggtaaataactatgttactcattcatctaggtagtttgatactacctactgatactggagttggggagggaagtgctgggaagggaagggtgtggtccctggctagggctccacccctgggcctgtgcccatgaacctaggtgaggacaggcatttctgtttttgtgcccaaatgttgcatttcccaagaccaacctggcctaccacacccctctcctgtgcctataaaaactcccaataccctagctagcaagcacacagcaactggatgtcgagaggaacacaccagcagaataagatacaagtggctgggcattgaggggaatgctctggcgtaagagcacatcaacagatgccggcaggccagcaggctattgaccagcaggacgaggtgaagtttggctggggcagtcgaaggagagagctccactgctgagtggccgactccaggggaaaaccaccttcccactccatctcccttctggctcccccatctgctgagagctacttccgctcgctaaaatctttgcactcattctccaagcccatgtgtgatctgattctgctggtataccaaggcaagaaccctgggatacagaaagccctctgtccttgcgataaggcaaagggtctaattgagctgactaatgcaagccgcctacagrgagctaaactgaaagagcacactgtaacacatgcccactggggcttcaggagctgtaaacattcrcccctagacactgctgtggggttggagccccacagcctgcccgtctgcatgctcccccttgaggtttgagcagcggggcaccagagaagtgagccactctccctgtggcacaccctgtgaggggsacaagggaacttttcccattttactaccaaggccagtgacatgaatgatcaaatacyaaccagctacattttatttaatttttaatttttttagttgtcagaagattttattaactgtaagccagggaatggactgatcgattttattatgcaaatcaatgaaaaaaaaaaactcttttagaaggacacaaacacacacacgtgctcacagggaagctggttgttggttgagagtcaggtcagaaccttggagagctcaagataaagcgggggcagaaccacaatcagaagcttccatggctgccccccacatggatgagttttatttaattatttttttccttcaacttttattataagctcaggggtacatatgcaggatgtgcaggtttgtgacataggtaaacctgtgccatggcggtttgctgtacagatcttcctgtcacctaggtattaaacccagcacccattaactattcttcctgatgctctcaaccagctacattttaaaccctattttctctaaagatacatcaacagattagcttattcttcagtcctggatctaacataatttgtacagtaaagtgaagataaagtttattcagattatttgtacaagtactttctcatcaaagtgcagcagtctactttctgtttcccatgggtgataggagatagggttaaygaaacagcagtaatttagagaccagttttagctgcatattgcartctttctttagaactatcctaaaagctgtctgttgctttgaaatgaatcttacttccatttcctccttttcttttggacctgctcaggagcaataaaatagagcaaatgtaaacagcagaaatgagacagaaggggacttggagataaaagaaatttgtttcttctgcattcttcagaatgcagagtagttcctggcagagagtagatgctaagttaatgtttgtcaaattaagtgcataacccgaatattcagaatagaaatctaaatagtttttacttgcctgaacacaggaaccttactcctagaaaatttggctggctagcagaaacaactttaagtgccttgaaaaaataagtaacagatgataggttgcttctaactggaggctggtggaagacaacatcacattaggtctaggggaggattattacttgggaaggtgggcttgagtcagtgatgggttgagaggatgcggtagtaaccaaacaggtcagccaagccagcagccatcagggatggagccaaggcaaacttcaagcagacaatgctgaatacaaaccatgtctaccttctcagattgcctcccacccacctttctctttacatattggtgtaatagctatgctgattagcctgtctccttctggatgtgggtgaaaggccacattctggagtttaggacctgctttttcaagtggtactcaggggattaaatgacacaatccagaagtgtgtgtgaggagtgattagctccctgcatgtaaaacttgataaaagaaaaatgaaagacaggagtcctcgcttccttctttctttcaaggactactccaaggtgagatttcatttgcacattttcttaagaagtcctgagagctgggcagacatggttgcatcctggcccttgtgttgcttctttctcctctcaccctcattcttctagcctttcatttcccaactaaagggtcaaccctttcattctttcttcaggctctgctttctaagaaatcaggagtaaggtactgactaccccagagctgtctcacttggagctctttccctcaagcttttctgtttagtgtttttgtttgccatccaaggacataaaaagagaaggatccttcctcaaaaaccatgccctcagtctcctatgttactcctttttttggtgctgtgtaatagttatttyacaccataataaatattagctatacttgccattgtataggtgtaggggaggatgaggaggttcaaactgtattcccaacatcataacttcctgttacatccaagagctgttgaacaatatcgagtttcccaacrtatgtgtgattggaatcaaaggaggagaagaaagggagacagttcagaagataatatctgtggaaataatggctgggaattttcaaaaaataatgacagaaaccaaaccacagatccaggagtctcagagaacagcaagaacaaaaaaacaaaaaacactcactcctctccctacatacacatgctgtggcatagcataaaaccaaaaaaacagacaaaaycttaaaggtagtcagagaaaacraaacattacataaagmggaacaaaggtacagtggtgcaaagaattacagtaaactttttgtcagaaactatgcaagccagagacaatggagcaacaactctaaagtgctgaaagaaaagtatttgttaaccaaaaattctacaccttgtgaaaataccttaaaaactcaaggtaaataaagattttcttagacacacaaaaatggtgagaattcattttcagcagacctactgtatgagaaatattaaaagatgttcttcaggcagaaaaaaataatatatcagactgcaatgtagacctatacgaggaaataaatttcattctttctttaagatactgactaccctaaagctgtctcacctagagccctttccctcaacttttcttttcttttctctctctctctctcccttcctttctgtcttctcttctcttctcttttcttttcatttcttttctttctttttgacagagtttcactctgtctcccaggctggagtgtgatatcggctaactgcaacctctgcctcctggcttcaagagatccttgtgcctcagcatcctgagtagctggaattacaggtgtgtgccaccatgcctggctaatttttgtattttcagtagagtcggggggtttcaccatgttggccaggctggtctcaaactcttgacctcaagtgatctacctgccttggccttccaaagtgctgggattacaggtgtgagccactgcacctgacaccccctcaaacttttctatttagtgttttgtgtttgtaattcaaggacataacgagaaaagagttcttcctcaaaaaccataccttcagtcccctatgttattccttttttagttctcttactctgtaaaattctttcacactataataaatattagctatacttgcctaggtataggtgtagtaggtggtgaaaatggaaataatgaaggtaaaattaaattaattttctaaatattcttaattactctaaaacaatggttctgaaccccaggagatccctttccattacgattcttccccatgggaacactggcaatgtctggagacatttttgattgtcacagcyggggtggtgctactaatgctagtaggtaaaggtctgggatgctgctgaacaccctactatacatgggacagactcacacaaacagaattctccagtccaaaatattaatattgctgaagtttagagaatctgctctaaaagataacttctaaagcaaaaacagtaacactgtattgtgtgtttacagtatatataaaagtagagggtatgaaagcaatagtacgattaatgggggggaggaattgggactaactattgtgatgtccctacatagcacaggaaacaatgttatttgaaggtaggctcttgttaattaaagacgyatattttaaaacctaagacagccaataaaaataattaagataaaatggaataataaaatacattcaattaaaaaagaagagcctgaaaaggagagcagaaactaaagaatagatagaacaaatataaaacagctagcaagatggtggattttaattgagccatttaaataaccacataaacctcatttawtgagacctgaattaacttaaaaccaaatcaaagacatgacaaaagaaaaatgttatgtcattatccctcatggacatatctatccacatcaaaatacattagtcccacttattggtgggggatattttccaagaccctcagtggattcctggaactgcagatgataccaaaccctatatatactatgcatgaatttcttgttccttcttcacaacagataaagtcacagatggaaaattagttttcatcatggatcttagtaacttcagcatacgattttttttctttccatattaagtcaagaactttcaccttttcacttaaaggaggcactgatgscttcttttttggtagatctgaatggctagcatcactactcttgtgctctagggccattacaaagtaaactaagaatgacttgaacacaarcatcacaatactggatactatgatggttggtctgataaataagacaactcctgagtgagtaacaggtgtgggrgagggtacagacacatggataccctggacaaaaggaggattcaccttcctggtggggcagagccaggcggtgtgagattttgtcatgctatccagagtggtgtgcaatttaaaatgygtgaattgtttatttgtggaattttccatttaatatttccagaacaccactgaccataggtaactgaaactgtagaaagtgaaaccatgaataagaggagactattgtattggcaagttgaatatagcaattttcaactttttattwaaaaagttgaaaattactaggctgggtgcagtaattaaaattaaaaaatttaaaaatattaaaatttttattttaatatttttaaattaaaatatgtaaaaatactaggctgggcgcagtggctcatgtctgtaatcccagcacttcaggaggccgaggttggggaactgcctgaggccaggagtttgagaccagcctgaccaacatggtgaaaccctgtctctactaaaaatacaaaaattagctgggtatgggggtgtgcctgtaatcccagctacttgggaaactgaggcaggagaatcacttgaacctgggaggcagaggttgcagtgagctgagatagcaccactgccattcagcctrggtgacatagtgagactccatctcaaaaacaaaaacaaaaacaataaacaaaaaaacactacacagtgaagtgaggcttacatgggcatgtcatgctggttcaatactaaaaaaattcagtcaatgtaactcatcatattaatgatgtaaagaaaagccacttgatcatatcgacagatgcagaaaaagcatktgaaaaattcaccagccattcatgatgaaaagtgtcagcaaactactaacagaaggaacttcctcagcctgataaagggcatataaaaaaactgtatagctaacatcatttttaatgctgaaagactgaattcttactctctgaaatcaagaacaaagcaggaacgccactctccccagtcctataatttacagcactagatgtcttaactagtccactgaagcaataagaagaaataaaaggcatggaggttgraagaagaaaaaaactgcccctatttgcagacaacatgaacatttataaaatctaggaatttagaaaaaggcttctagaatgaaaagtaggtttatcaaaattgcgggacacaggccaatacccaaaaccaactgtttttccataaactggtaacaatcggaaaccacaatctgaaaatgatatcatttactatagctccaaaaaatgaaatacttaggtataaatctaagaaaacatgcataagatctgtatgctgaaacccacaaaacgctgatgaaagaaatcaaagaagacaaataaatggagcgacacatggtattcatggattagaagacttaagagagtaaagatgtcaattctccctcaactgatctatagacttaatgcaacaccaatcaaaatcccagcaagttttttcttgtaaataaagacaagctgattctaaagtttatatgcaaaagcaatggaactagaatagctaaaacaacttagaaaaagaatacagttagaggaatctcattactagattttaagacttactataaagcaacagtaatcaaggcaatgggatagacacatagatcgatggaacagaaaagataycccataaatagaccttcacaaatatggtaatttgatttttgataaaagtgtaaaataattcaatggagaaagggtggtcttttcaacacatggtgttggaacaatctgtcattcacatgcaaaaggagacatgcatcctcaactttatccctcataccaaaaattaattgactcatagctctaagtattcactgtaagactataaaatttttaggagaacacaggaccacagggacctctttgcttagttattcgggtcagagagaagtactttctttcagtttcatgcctcacattgctgtgtgcctagtgctgtatccgcctatgttgctgccttgagaatgcagcttcatgactgggacttgcttcagtctagggcagggagaacaaaaagaggaaaaaaaaatgaggatttgcccacagatcctccatcccacgggggcccttctttcaggttttctggttagaaacagaggatttctctgggaacyttttctgcccacagttgctgtgcagttcctggatttgcattgccctgcagtctaagctggaagatatggaatgaaaagatgtcaggaaattcactgccctctgggttactttcaggatttgattttcttcccaaatatgcctgctattatttactaatcagcctccagatgctcactttatgtattctgtccaaggattttcgccaccctttctgataccgcaaactgccctccgttttacctccctgcatttccaaatgcatcatcttagtacctcttagtagaactggagccactaattctttcctcttctccatgtgtttttttttttttttgaatcagagttttgctttgttacccaggctggtgtgctgtggtacaatcatagctcactgaagcctcacttcctggactcaagcgatccttgtagctgggactacaggcatgagccaccatgcctggctaagtttttctattttttgtagagatgagatcctgctatattgcccaggctggtcttgaactcctaggctcaagtaatcctcccactttggcttccccaagtgtgggactgcaggaataagccagggtgcctgactaagtttttctacttttgtagagatgagatcctgctatattgcacaggctggtcttgaactcctgggcttaagtgatcctcccactttggcctcccaaaatgtcgggattacaggcttgggccaccgtgtctggtcccaccaactttttgatggaagaagtcaggttcctcgtgtgggtgattgctttgaagtggaaacagcaccaggttctagccaacaagacataagggggccttctgggagaactattttgccctaacaaagagagcgacccatggagaaattctacctccctttctgccattgagcgttattgtataaggacatgatgctcagaagtgtggctgccaccttgtaccacaaaagaaaagcaaaaacattatagagaagcaaaactagagcccagatatgttgagcagtcaattagacaaacttgagccagttgcctttagactcctacttgtgtgggatcataaatttccaatatttaaaccacttttagtgagtagttttaaaattgcaacccaggtcattttaagttataaactaatattattccatttagggattcagccatccacaaaaataactgggatggaattaatgaatatttcttaataattaaattatgttttaaaaatatgggtgagttgctagtttattcactgatttgacatatgtgtgaagattgtttttatgtgttagaacaataaagctaaaaatggatatacaacctgaaaataaatatggattacatagaattattcttgatttctttgtggacttggagagatgttataattctattcatttaaaaaatttgtttaaatgtatggggtacaaatgcaattttgttacatgcatagattgtgtagtggtcaagtcaggacttgagggtatcatataattctattctttattttccttcattcacccttaagaaatattaattgggtgtccattatgtaccggaaactcattctaggttcttggggcactaagaagagccagaaaaagttgctgtttttaaagtgttaacagtatagtaggaaataaagacatatcaaccaatactgtagttaaaatgcagagtgatacaaactaatatatggacatgtataaaattattacaggaataaaaaaagctgttttgaggtatagtgtttctttcctatgataatggatttatataacacgtatgaatacagtccattttgtttggttctagattactgggtagtatcagatgctttaattttcataacttaagactttgaaaggaatatttgtcatagaaatgagtgaaaaatggcccctgtttattggcccctacattgtttgcttattcacagcacagtaggatggttagctcagaacctgccagggccaaacgcaaattctttcacagccaattgcttaaaggtagcccaaataagcatattttcagccacttacagctcacctgctttgcatcctctacacaattgcatttaacatctgctagccacagagaagacaaaccttgtagctgtagaagaccccaaactgctgcagcccttttgagctctctgagccagagactccctgtattgcttctgggcaataccacctggacacatgtgccccctcaccgatccccgtctcccctggaatttcccttgccctcttcttctgggtgtctctggramgtcttctgctgtgaggactttcccttttctgcaatcctgtccaataaagcttgcgttgtgcaatattgccttcttgttctatctttctgtcttttctttgatcagcccccagatcctcaaactcaccattgttctctgctattatttttcttttaatgygcattaatacacacacatatatatacacacacatatacacatatatacactctttggaattcttttccttgtatgtctcttcaatattctctcacacttccttcaaatgtctgcccaaaccttgcttctcaatgagtccttccttgaccaccctttctgatactgcaacctgccttccattttacctccctgcttttccaaatttcccttcccttgctctattttttttcttatttctctgctacttgttgtctattcacatactatatactttactcatatatgtttattgtttattgtatgtcactacctattaggatattatttcttcagaacttgaagatactgctccttggcctcagcagtttcactgttgctagtgacaagtcaagataagactatttccttcggtagccttgaaatttttccctagaaacttttaggttctcttgtttatctgtgtagttctgagctgcaccaactttttaaaagagagcagtcttgttctttcctaccatttgatacttagtaagcatttaattctgaagatgtgggtctttttttcagttctggaaacttttctgtgtgtatacccaaacacacacacacacacacacacacacacacacacacacacagagatctttctataaacataatacacatatataattctgtgtgtaaatataatacacatcatacacatagatacacacatgaacacacacataaaattttatatctgtgtgtattatatttatttcctctctgctattgtagaacttgtggatctgttttttatgcaactgaaggtttatctcatattttccacctctttttgtgatttttaatgttttatgaagaattctttagttcaatttgattttaatagctccattttccccttcagcctaccagttgagtttttaaatatgaccatatgtttaatttctaagatctcttttgttatatttttatagaaggcttttcttatttctctgagggtattaactgccttattttaaaactttattttcctttgtcttctatttgttgaatttggctcctgtcttttgtggatattaattttcctcaaatgttgtgtgattcttgtttggttgcccatatttttatttgagagtctccttttgcctcttggtggtctgagtacagaaccctgtctcagggggtctagggggaggtggggattgttgccgagtaggttgtgtgagaccataatcttccgggcgtaagtcactcttggggattgtgactgatggtggtagctggaattgttctcattgacaggcttttcttacacaagagtcaaccccaagttctagggctcaaatcttccatttctgagagctgtgctccctgcttttacttaggggctaaagccagaacctctgttccctttcaacgtttttcttcctttgttgtccacttcgaagtttagcagtactttggtctttgctcttctgttttcagccccaacatttctacaaagcctgtggctctaaaccttgtttgctcattgcaatcacctgggaagcttgagaaactactgaagccttggtcttacccccatccccacccccaccctgagatcttaatttatttcgtctggggagcagcttggatgctggcatttttctaaattttctagttgattttaatttacaaccaagattgctaaccacagtgctaggaaatggtctcaagcagatctttcctgtaagtgtattaaaagttcttggagtttatcgtagggcagaagccttctttatctgctgctcactgtaagaatcagataggaaggaagggggctgtctacacagcctttggtgacacagtttctttaattagtcatcttcttgtttgaccaatagcctttccttattttgtatctcttaaccttaataactgaacttgaagtacttagaattgcttttacttcaatagttgtttttattatttttcttagttgttttaggctaaagtttctcttccgttttttccccatcactctcctcttagtgatgtatgattttccaagattatttaaaatttctggtgcactgattggcgctatttttcagcatggcagtacattttttaaaaattatttttcttgttatttgcgtggatttgaagaggaatggatggacacatctgtgatcatactaccaaatttattccacctcctagttctatctccatttgtctttctctgctaatagatctataaaatgtggaaagagatgttttacaatctctcatagcaatcctattttttgttttacataatttgatgcttttatatgaaacataaagtttcatggctattataaattttatgtagattttgcctttcatgaatataaaatgaccttcttttctatggaaaccttttttttttttttttwaccttatattaaattttgtttgaaatcaaaggggccatcctttctgtttttaaaatttcatttgtctggtaagcctttgcttattctttcaaaacatttctcattttaatgtgtctctttaagcttaaatagcgtatgtctagatttttaaaatctttttttaaatggggagttgaaataacttaaatgtattatcataacttatatgcttggcctcatctccgttatcttgttttatatttttagattttatgctttcttgctgttttctggatttatgtcttttactttgtgtaatatgctttgtttgcttttaccttttccaatgttctgaaaggtaaacattcctcttaaaattttaattttggtttttagaaaatgatacttaacctattattagaaatttaaaaaaaattaaaatttccatcagaattcttacttgcaaacaatagaaactgactctggctagattaagcagaaaggaatcttctagaaggataaggagctgtccacagaattgataggaaggaaggttttacatggggagaagccactggtggctgcatggcaggactggctaggccacccccaggaatggcagctatctgattgcctctgtttttccatggtctttgtgttccctggacactggcaccagacacttcctcagccaccttccccacccctgctctggacactgagctccacagctgccactgctggatttctgaaaagtctctgctactaagcatcatttgtttcacatgaatgtcccaaacaagagcacaccacgggctaagcttaagcctccagcccatggcagagccaaaaggggtttgagagggcaagtttctggctttttcagcttggaagtgtggcaagttcttgcttgcacccttccccaagtcccagatctctgcccaatatttatccctcctctagttttattataatctcttctcaatattttataaattatgacaaaactgaaaagtgaaatacctctataccagaggtctccagtctttttggaagcagggaccagttttgtggaagacaatttttccatggatgtgggtgggaggggattcaagtgcattacatttattgtgcactttatttctattattattgtgttgtaatatataatgaaataattatacaactcaccataatgtagaatcagtgggagtctggagcttgttttccttcaactagatggtcccatctgggtgtgatgggagacagtgacagatcatcaggcattagattctcataaggagcacacaacctagatccctcgcatgtgtagttcacaataggattcatggtcctatgagaatctaatgctgccactgatctcacagaaggtggagctcaggcagtaacgtgagtgatggggagaggctgtaaatacagatgatgcttggctctcttgcccaccactcacctcctgcttttcagcctggttcctcccaggccctggactggtatcagtctgtggcccagggattggggacccctgctatatacaggggtaaaaaaagagggaagaagagagaatttggttaaaatatattcatagaaggaaggaagtgtgaagagaaatcacggtccttattgcttccattggttatrtggttgcagatccatgctgcccagtgaaagttcttgtaatgatgcaaatagtttgtacctgcactgttcaatgcagaagccacctgtggccagcaaacactcaaaatgtggctggtgaaatgagaaactaatattttaattgcatttaattttaattaatttacatttggatttaaatagccacrtaaggctggtggctccaatgctgtacagcgtagctgtgaatagaatgatattccctttgtcttcagccatacgtcagtgaactgggatctctcccagtctaattctttgctcaatttcaggacaaccgagaaacctagctaattttgcctctatgagacttccatagtcattcactcaaaactcatcattgaacatgttaagaaaggatctaaccatattttcctttgtccttatggagaaggagcaaccttatttcctttttgataattcatgtcaattactaggcaatcctgtaacactgcatttttatctgttcacccgatggtaaagggaatacagacagtctggtggcagttcactgggatggttatctccttccttgcaaacaaaacttccaaactagtggataacagctataagaatgtgtaaagttttttataagtacattaccaggtttaattcttagaggtatcacacctccttctgctccattgtttcctggacccatattctgactgtagaagaaagagaacatacctagaatccttcagggctgcaatctggcctgtctttcagctggagtgactcatttttccacagctcatggaaatgttctataagtctagctccagctgcttttagatgatgggatacataataaaactagtagctggtttattcattttttccccatcactgtaaagtgagttcctaggtcagaaacaatatcctttgaggcaccatgcctgtcatgactatatatgaggtattcagtaatggttgcacttgtagaagcatagttgggaaggaaagcatatcaaagtccaaataataagtgaagataaatggcacctttatcaggaaggaaggttgccaatgcaattaaccttgtgctaggtagctggctaggtrgctatcccccaaaggcatggtattatattgggggctccaggttggtcttttaatgggaaagttgagcaaacagcagatgtgttatctagggaagagagggttggctgacaatagagaaggtmattttatctacctgattattaaaagcatccctgcactgggtattcacgtttgatacaaatattctctccctttgggcccattctgagggtcctctagaatagtagctgaaattggggttaaaagctgcttaaattttgacagtctgctttacttctctaaataccagacatcttcaccaggttattcccttgatcttgtgtcctgatattatgaccatgcctctggcatttaagtgccccatgtggcctctgtcaccctcagatcttcccattttctttaaaatcaaggaaacaatttcactgcatcatgttctactggtctccctgtcccatagggacctgctcaagctgttacaaagaatatagagtgtcagtggtgaaatctatgtcaataaatacagtcttatgtaatatattctcccctccttgtccaatattgtctgaatccattcacatatatattccccatatgttttgccagcataaacaggtgaggccctgcactgtgtgtgtatgtgtgcatgcgtgtgtgcatgtgtgtgttaagcaagcaagttcctcctgggcttgattttgattttgtaatagtatccctggggcatgtttagatatgcttcttagtaaaggtttagggacattgacgaaagggaattctctcatttttaaaatgacgtatgtagagttatattgtaatgaggaatcagtgttcttttggctggcaataaaggcttactggaaattgaggcttgcaggcatagaattctccaaatattttgaatgtaaacacaaacacaaacacacacacacacacacacacacacacacacacacacacaccacactagagagcaccagtaaagaaaaaaaggttaattaaattacagtataaatgcatatttgttctcttttgttatcttaactaacttaaaaagcaattgtaaaaaaatgtagataatgtattgctttgcctataacataggaatgtgttatgtttgtcaataacagcacaagtaggtgagtgggaacaatggtgtgctgggaaaatgattccagatggttacttgatcaaagtataaatgaaggaaaccagaaatgataaatgggaaggttaatacaacaaaagctacaaatatatatttgctcccctttcttttctctgctctttaaaaagacctaaaatcatataaaggaagaattttaacaatgtattattgggttggtaatattgacagatatacaacaatagtactacaataagtaggaaaagggaatggaactattaaaataacatatctgtatttcactggaattaaaatgatatcaatctgaagctgattctggttagttaagatgtgttggtaggccctacaaaagacgctaagaaaatgactcaagaaaagtaaaaaaattgttaaagaaatttaaatgcattagtagaaaatattcactcaattcaaaagaaaacagtaagaaaggattagaggaataaaaaaccatgaaatttatggaaaacaataagtgtaatggtgaatgtaaatctatatcaataataacattaatgttaatagaatatacaatcaaaatgcacaaatgattagattggataaaaaataagatccaactgtatgctgtctaaaggaaataattttgattcaaaaacacaaatagaatgaaagtaaaaggatagaaaacattatgcaaatggcaaccataagaaaggtggaagggctatactaatatcagacaaaatagactttaaaacaaaaaaaggtactagagacaaggagagggactttatagagctaaaagggtcaatttgtcaggaagttatgagtgatcagaagtgttttatcagttttgagaaaccctttgccagtatttgttcacatctctcttaccccattttccttctctttttcttctgtaacttcacttgcttgtttattagatcttctccctaaatcctacctgtctctaatgcttttttctgtgttttcaattcttttttttcctttctctgcttcagtttgattgttttctgttacctgttttccaggtgatggatgctgtgtctaatgtgttattgaacccaactagttagttcttaattttagattttgtttttttttagttctggaatttccatttgatcctgttttcaccattttgaatataccgatgaaattacctagcctttcaattctttatgcatattcttcattttcatattaattgaacattaattgaattgtggttattttaaaatccttgttagttaagactaaaattgggatcacctatgggtctgtttctattggttatttattttcttttgttattttttgacatgtgaaggaatatttgaataaatgccagacattatttatttaaaaaatacagaaactctagattcctgagaaggctcactttcccctcttggcagagtggtggtcagttggcttacttcagtaaggaactgtgctgaatcatggctgcatgagggatgacctctggctcaagactgaccttgtgtagtttcatctaggatgttggtgtgttttgggaacgttcttttttatggatatcaaattctaatctttgtcatgtgagactgacaacagagctctgttttgttttgcagggtcttcccagttacgtttttgccttttgccacatacgggttccagttttcaatacatgttttggggaaaataatctgccatatgcttgaaacctcataattctccaccaaaactcttctgattccttttactcctgctgcagccctcttccagctgttgccctggattttgccctagactcttagcttcttgcccatattcaaattcatcaatacctccaggagaaaagcaactgcagaggccagttcacctctctgtttcttcccttataaagtattagtccattttgttcttgttgccttagcaactcttgtctttttcaaaagaaaatttttgtattccgtctggcttttctagctctggatgggagcactggtctttggacaagtggacaagtaatacatcctccctagaaggtaaagaatctttgtgtagtacatattttgaaatatctttctgtttattcatacaaatttgccatttagctgatatcagaatttgagggacatgatatttttccttaaaagcataaatgtattttttttgtctttttagcattttagagtttatcaagagtctgatttttatttattttgttgttaaacttaaaaaaaaatctgggtgtttaaaggcttatctgtttagtgaaaatactatatatttttccaggatatgtgtttatgtgggttatctttcagtgattttgaagagtttgtgataagctttatacactaagctttcttgacagtttctgtgtggttttcaattaagctctagatgtttgcttcttctctagttggagtgtcttcctgagaatacctgtgactcttaggttcaagctctctttcctttctccttacccgtaatcttcaccatccattttttttttttttggtcactttggtttttttgtactgcattttgaaaaatttatcaaattatttctgtttgattagattttaccaagtttaatcttatgcttcattgaatcaatttgcatttaaatcctactattgtgattttatctttttgaaaattatcctaccttgagtcttttttctctcttttctatgcatattagtcttttattcttagtcttttttttttctttgtatcttggctttctgcttctgtttcatagaagtcatgcattctaataagtatggcaaactaatggaaatttytcctttctttagcaaatcattttcagatatttgttatccttgtacatttttaaggtgatctttcctttcattttcattgcagtattttaaaaatcaactttagtgaggtatcatttacatttattaatatacacccattttaaatgaacacttcaatgccctttgtatatatccatatattcactaccacaatcaagataaggaatattttcacttcctcaaaaagtttcctatacttttttttgtagtcagttactccaacatcattctcatgcaaccacggatatgatttctatcattacagattagttctggctgttcaacaatttcataagaccagagccatctgctatgtacttttcttcctagcttcttttgctcagcttaacattattaaaatttattagtattgttatgcctatcaatagtttgcttctttttgtcacttagtaatattccattgtataacacgctgcgtgtatccattcttgtattgactgaatgtttgtgtacccccagaattcataactgaatccctaatccccattatgatggcatttggaggtgaggcctttgggaggtgattaggtttagatgagacaatgaggatggggctcccatggcggggtttagtgtgcttctaagaacagaaagagagcagagcactctcaatctctctctctttctccaccgcccacacccccaaaacacacactgtggctgtctgtaagtcaggaagaggacccttatcaagagcctgaccatgctggcaccctgatcttggacttcccagcctccagaactgggagacataaatgtctaagtttttttcacccaacctataacattttgttttatcagtctgaggagtctaagacaattctcctgttgattggactcttgagttttttctagtttgcaaccattatgaataaaactgctatgaacattcacgtatcagcctccttttcttcatgtgtatgtttaagtctttgtatatatttacagtaactgttaatgaagaccctgcttgctaattcaatcatttccatgttttctttgtccattccaattaactgatatttctcttggatatcagaagcattttcctgccattttgtatgtggcataatcttcatctgaatgctggacatttttgagtgtctggattttttcctccattcctttaaagattttggagtttttctgtgtcgggagggtaatttactttctggatcattttcatacttttgggatgtgttttcaagtttcttttgagtggatccagagtaacctttactccatggctattaagccttactcctaaggtgcacacattttggagtctctatgactgctccaaatgttcagtggtaactcttcattctaggttgtcagaactcagatacctcctgtactgcctgaggaagttgttcagcttccagcttccctgtaggtttttcctagaagccattctttgcctggttagtcctacgttgcctgttgttcaatgtctgaaagtagttgttacatatattttgtctagatttctagatgtttatgrtcggaagcctagtctggtactggtacatcatcatggctggaagcaaaaatcatattgtagtattttcttttttaatttttattttttgagtcagggtcrgggtctcactttgtcacctaggctagaatgtagtggtacaatcatagctcactaaaacgtcatactcctggcttaagtgatccttcctccccagcctgctgagtagctaggagtataggcactcaccatcaggcccagctgattcattgttttgttgttgttaaagatgggctcccattgtgttgtccaagctggtctttaactctcggcctcaagcaattctcccaccctggcttccaaaaatgctgggattgtaagcatgagccatcacacttggccattattgcattattttcaacagttatttaaaattcattttactatttgattattttattttattcactattcattattttattttattcaccattttcttagagtctatgtgaatggtttgctttgtaacacctttgtccttttggaggtgattgaaacctcttttcaaatacatagctaagacagaaaattaatttcttcctagtcttagtgaaattctcagtgacattcaatacttgtatgtcagctaacattactgagtttgactacatgaaacaatccaatccacaggtccagatctttgacactttgaataaatctactatgaaacttcatgactccttgtatgttctgcagtcagagatcttcatcttttcattcagaggataaatttattgctcttctttgagagttatgaaataagactctccctttctgtctttctggatagtgtagtccaaagatgttacatctagtattgcttcggcaagtttgacaccacgacggtaggtagaaggatggtagtttaagcagaaaatgggatcctactttaatttatacaaaaatatttatttagtacctattgtgcatcagacactcttctatgagctagagatacaaaaatacctgaaccttgcattccattgaatcaaaccactgcattacctaaccctgaaatgcataccatctttagctttttgaagttacgatagtcattttctcatctttattgtttaaagccatttgacttaagttttctgtacttgcaaacaaaggaatcctcagaatatttcactgggctgcatgctcacattgtagtttaccactgccagttccccatccctcttctaacaaaattcttgcctggtgatatttttgataagaatggtagctaacattaattgagcccttactatgtattgggtacttttctaaccactgtacatgcattgtatcatttagtcttccaaacaacccaatgaagtaagtactactattatcgcccttttactaccggggaactgtaaactttctcaaagctaccttgccagtaagcatggaggatttgaacttagcttgtctggtgggaaagtctgagttttcaaccacaacattcttttactaaacacttgcttttattcactggctgtattgtgaatatgttttcgtgcattcaaatatcctcttacaactatattaccattttgctccaacatattcaattatgtaggtaccatattatatttagcctacatctccttttttggcattattttcttctaatttttcacttgaataatgacattgctatgtacattcttgtatatgttactctttttttttttttttttgagacagagtctcactcttctgctcaggctggagtgtagtggtgtgatcttggctcgctgaaacctctgtctcccaggatcaagcgaatctcctgcctcagcctcctgagtagctggattacaggtgcatgccaccacacccagctactttttgtatttttagtagagacagggtttcaccatattggccaggctggtctcgaactcctgacctcatgatccrcccgcytcggcctcccaaagtgctaggattacaggcatgagccacagcacctggccatattactctttttagaaaaccagtctaattatttcttttctttttttttttttttttttttgagacagagtctctttctgtcatcaaaactggagtgaagtggcacagtcaccactcactgcagccttgacctcctgggcttaagcgatcctctcaccttagcctcctgagtaggtgggaccataggtgtgtaccactatacctggctaattaattttttttttttttttgtagagatggggtttctctatgttgcctagatttgtcttgaactcctgggatcaaggaatcctcccaccttaaccacccaaactgttggaatcatagacatgaaccactgtaccaggctactctaattatttctttagaaaaattcctagaagtagaatatctggaaccaatgaccagtctattttaagttcatgatggaatatgcaacgttgtcctccagaaaatattagtttacatttctaccataagtatatctttctcagtattttagtaagaaatgtggtaagcattaaaatttaaaccaggctgggtgtggtggctcatgcctgtaatgccagcactttgggaggccaaggtgggtggatcacgaggtcaggagttcaagaccagcctgaccaacatggtgaaaccctgtctctactaaaaatayaaaaattagccaggtgtggtggcacgcgcctgtgatcccagttactcaggaggttgaggcaggagaatcgcttgaaccccaggaggtggagatggcagtgagccgagattgtgccattgcactccagcctgggcaacagagcaagactccatcaaaaaaaaattaaaccagaaattccctttattcatttttagcccagatttatctgttcctgatcactttatttctcaaggctatcagtgcttatcattttttcctcttgggcagtatctatctgaattctgtatttttaacatgtattttgactcctcatgttcctagttttaaagaattagtctgtgaacttgctgtgggtttaaggttttttcctgagaccctgagacctcactaagattttcacttggcagggttaaagagtgaaataatcacctggatatcatggctgaaaatgctattggaaagtgaagaggaggttgcatgcagtggctcagtcctgtaatctcagcacttagggaggctgaggtgagaggatctcttgagctcaggagttcaagaccagcctggacaatgtagtgagacccactctctactaaaaatacaaaaaattagccgggtgtggtgggacatgcctgtggtctcagctattcaggaggctgaggatgaggcagaaggatcgcttgagtctgggaggttgaggctgcagtgaactgagatcctgccactgcactccaacctgggcaaacgagcaagaccttttctcaaaacacaaaacaaagaaagaagggagttgggttggaatcacttaatttgagaactcatttatatctcattaactagtttcctgtttttattttaaaacccagatatcacagtgaaatttaaactcatattcataaaggaaaacaatctgcaaagtccaatctagtttatatcattagtaagaataatagtatggtttaaataagatctatatatttttactaatattcgttctgctttcacaaatatattgccaygtgtagayctctccttcataccaagagttcagttggcaccatgaacagttcaaaacactaatacttgtgatcacagtattggttcttaattaaacgtacaattcccccccacacactatttatggattgctaaaacaatattttcacctttatctttggctgtcagatagcaagttggacagtgaagtagaactgacagaaatgaagataactacaaagttagcattgatttttgcctccccccctctgtcttttgagattgtttcttcacatttctcatatcttttctcctgacttatgaaaggcaccctttcttgctctaggcctttcattgttttgaaacataaaaaggaacatcaaagactttcatcgtgtgcgttttggatcttactctacgttgacaatatcgagaggttcacattcctactaagcctgtgggtttagttcagcaatgctccccatttttctctactgaccataacatttcaaccctgctggaatctttgaagatggttattgagtgactttagaatcatcctcggagttagaaaaccccagaaagcatcttttctttggtattttattctacatcttgaaaacagtaagaacaaatgcacttctctggggatataatgactaggaatggagaccatactaggaaaattgacatgaagagcaaaaagatccactcaaatagttcttttgcactatacaatgtgtcacaagttgcttcttaagaagaaagctagtcaaaatatagcttaccttttgtgtctcagatggctgggctttagaaattgagacactctggtcaaatatctagcttcagaaggtgttgtttacatcctcatcaattcatctattatttgcaattgtttgcatttcaggttttagaaataaaaaagtgttataagaattcactgtatacaaactgacttaaatgtttttataggcttagtcaaagcctgatttctttacaagattagttctaaatgaaaatagaaagagcttttgatccctcccaagggagtattcccagataatattattcatttactcttccttataaatgattttctctgcttataatttgtggtttatgttttcatacttgcagttggtaaaactgtccacgaaatcacttctgacaccaactgcaagtttgggggttcccacgaccaccctcacctctgacaccagctgtaagaatgagtgtctatgaggctactctcgggcttgataatttgctagactcactcacagaactcactaacagccattgtcctcatggttacagtttattgcagcaaaagaatatataccaaaatcagccaaaggaagagatgcatggggcagagaataggagaattcaaaacgttgagcatctagtcgtcctctcccagtgttaactgcacctggaatgatgtgtaacaatactcagttagtattgccaactatgtgtctgttgtcacatggcactatttaacactgagctgtggtgaccagagttttcagttgggtttcagacacatagaatggttggctaactcaatctccagcccctctggaggcagagctgatactgtgtaacccaaaacttctaccataaatcccattgctagawgatctgggatggcccaaggctcttagctaaactaagacagtcctgtcaggcagaacattctaagggttcagagattgtctcccaggatccaaggacaaaggtcagacctctctttgggcaagattaaattctgtattacacaataccagatgagcagctgtcttttgatggctgtaaatggatagtgaaggatattttcaatatattttgggtaggagtagtgatctgtcatttcaggaagattacaggagtgtagatttgtgtctggtaggatgagaaagccaccgtttgaacctgtagataattctgagaccactgataggaagcatttatcctttggccaatattaggttggttgccatcaagtgttagcagcatacaacaagcttaggttttctaaaatacaaaaagatccttactgagagcatattagaggaaactaattctgtggaaggagaagtatatttgcttcaggattaagaaaaaagcagcatcaattctacattccatttaagtacatttccatttgcttgagaaaacacatccattatttagttgcgaatcaatttttgagtgagcagtgaagaaagacttagacgagagtctttctgaaagcttttatgggtagaattctacaatagagacttgattgttcctcattgtttcctccagttccatgaggattctatgtcatctctcctaagttcccttttatctcccccattagatgagaaaatgtgcaccaggccatctcctgcactcttccccatcttggctaatcattgctccatctatccatttgctcaggccaaaacctatgtagatatctgtatcagttattattgttgtgtaataggctactgcagacttagtggcttaaaacaacacccctttgttagctcacaattctgtagttcagaagcccggacatggcctatcttgactctctgctcagggcctcacaaagccaaaatcagggtgtcagtctgctgcattcttatccagagctcagggcttttttccaggttcatccagattggcagaatttaattgcttgtggttgtggaattaaattttccattttcttgctggatatatgggctgaagtttactctgagctctttggggcttttctcaggtcctagttgtgtggatttctcaaaacctggcagcttccttttctgagcaggcaggatgatctttctccagtctgccaagacagactcttatataatgttgaataatcactagagtaaccatcctactacctttgtcacttaacacaacctaatcaaaggagtgactaacccttaatggttacaggtcctatctgtggccacagggagcgattaagcaggggttgggggttttgggacatctcagaattctgctcatcaccatgtctttgtattgtattacattattcttcttcttattttatagagacagggttttgccatgttgtccaggctggtctcaaactcctgaactcaagcgatccacccaccttggcctcccaaaatgttagtattataggcgtgtgtcaccacacctggattgtgttacgttatttaataaaataatcatgtatctctttgtaatattaaaaaagactttaaatgaataaaatctagaaagaaaaaaataaaccagagactttaaacattcaaataaatgggggaaaacaaagaagattttaaagtttaatacatgcaaaatgttaaggaaaaagaaaaagggaagcaaagaaattacatggttaaaaaataaaataagatggtagaaataaatcaaaatttatcaatagtgccataaatgtcaattgactaaacataccgtcagtagagattctttcattggatgaaagaatataatccaactacatgcagtttaaagagtgcccctgaactatggtgatacacaaggtttatccactaaattatttaactaatattgtttttgtttctaagggctcttcagggagaaaattaaagtctctgtgctcctgaagctcacgttatagggtgggatgttgatgaaaaatgaaaagctatgtaataatgtagagaatgatcaatgctactaagaatggagcaggacaaaggggtagagagtagtttggtgggtgggaaggcctggatcttttagctgggctgtttagggctgactctgagaagtagagatctgaatggtgtgatctgagagaccaaaatattatttaatagatgctcctttatcaactaagatggaccctacggttaaggtaacttttgttttcttaaccttagggtccatcttaattgataaagttcgattttcagaaatcagctaatatgacaaatttccaaattctaaggctacaagaaaaaaacacaatcttgctaaattccctaaaagtaggagctatcaggctcctcctaactctgatttacaacccagaccactacaactctgactggactgaggaccggccttacaaacattctttcctgataagcaaatgtagaccttaagccagcttcagccagatatagaggctgtgcacaaactgtctccatgtcctgtagttcacctttttgagatgcccaggtgggaaggactccctggcagaacttccaacagacctgtgcgctgggagcaacgcgcactcgggtggagtcttgggaagtttgccccgtttccagtggggaggagcctggaccccctcttcctgggtggaacctgggattcagcctgcggggcagcaagcaygctagcaggactctggctttgagaagggtccctttttccccctttttgcccaataaatttcattttttctcacccttcaaagtgtccgcgagcctaatctctgatggtcatgtgacaagaacccggctcttagctgaactaaggaaaatgtcctacaacatttcgacataaacagccaaattccattctattttaatactaaaaccctgcccaaagtgaacatgggacgtatattacatatatgtttatccattgcacatctgctcggctccacttgtaaatatgcatagcttttctccaaaacctgctgaatatgtatgactctattgagtaatatgtaccctgtgtggcataaaacccaacctgccctttccctccttgaagcaagagcaccttcaacccacaccagggactcttcctgttttgcaacctgataatgccaataaagctctcctttctactatttagccctcctggtggtcttttggaccagaatagattgagggaatgagccacgtgggtatctgcatgcagaataagtatgaagaccttgaattgggatgtgcttgtcatgcttgagtagcagcaggctgataaaaatgccactaaagcagagtgtgcaagggaggacaggtggggaaaggaagtggcaaggggcaggtgatgtaggtctttaacaattatgctaagtgaaataatccagacacagaaaaacaaatagcatgtggtctgtcttatatggtagaatctaaagaaggtgaatttgtagacggagagaattacagtggtgcttgtcaggcactgggtagcaggatggtttagagggaattggagagctgttggtcaaagggttcacgctttcwgttataagaacaacttctggggatctaatataccatatgagtggtgatggatgtactaattaagttgattatggtaaccattcacaacgtatatgtacatcaaatcattgttttgtacaccttgaacgtattcaatctttatcaattaaatattttaaaataaagaaatagatggggaaatatatttattgaacacctattttgtatcacacttggtacctagtttgggaacacaaaatggacaagacagatggggtcttgccaccttgaagcttttgctaaatcatgttccctatgaaatattacttactgttatgacactgaccaaggttctttccttgtcctgactctaatcaggctgcattcagcctttgtggtctcaaccttgggctttggtgcctattcttgtggattccagttgtagcaagaatcctgcttaaagtcagtttagccagaactccaactcttgatacttagtcaccctcattcttcaattaaattcctcatctctcatcatcccccaggtaatatctgatcaccttagcctgctctcagcaagaatcttgccaagttggtttggtcagaatcctgtctgatgtttcctgttagtaattttgcatccactgatccctgccctgctccttggctgtaaatccccacttttccttgtattctgaattgagcccagttctatagtcaggtctcttttctcctgttgcaataattcctgagtaaaatatatttgtcacgatttaactcctgccatctctggtattctttgacatcacaaatacataaacagcaacaacaacttggtctccttgaaaataatgggaacactcaagctcatctaggaccatggaaatagcttatttccttatatctttcccttcatcttctttaaaagctatgatctttcaagagctacatttagaatcttacatggctgggcaaattttgatctatcttttggtgaatgaatcactgactattcaaccatataacaacttctggctgcattgttacccagtagcgagagtttgccaaacagtactttgcatgacaaactacactgtatctgcccatatcccagctttccaagtaatctttggaaagtgtttattataccacaaagtttccaaatgtttatttcaattgcttaggggaaaaaggattggtttggagggcagtgaaattggttgtttttcctacccattttccatgtgtttcactccattaggtctgggcttgcaaagtttaggaaggggtttgtatgtcacaattcaactgcaaatagaacatagcaaattctcttgtgagtgttttggaaaatgtatgctgctctttcagtgcttcatcaggctgtgagagattgtgaaaccccacagctttcacagttttgcagtcagaagaaagccttttttgtttttattactgagcatttaaaactcacgagaaaaaatggaaaagccctagaataaaagcgtgttgagaggaggttcaaggcagtggcaagaatggctatcccagttttgggtcaaaacaagtgacaactaacaagacagagaacatatttatgcttgctactttaatgtttggtctcattatcttattagatatattgaacgatatttgtaaataggcagggaaaattgaagctttgtgtgtgtgcgtgtgcgtgtgtgtgtgtgttttattataggtagcttttatagcatgggatttctctcataacaggtagaggggcatggttccttccccattctgaagctttgtgttgtttttttgcttttttttctagtataaagagttcaattagggtaactctgccccttacctcatttgtcctggtgatacgtatgaaataacaccaatttgctagttagattaattgtgattagtgattagattaattgtgtgcactccacttcttcttgctcatcttccttttaggaggaaggctgcccttggaggggaaatgttccctmtgttcctttcgcccatgagaatgggcctgctgtcttgtccactactgcctgtgactggctcagaagtgggcctaatgctgggattcattgaatgtgccttcctacccagctgtatctttgtaaatattgatcttttagtttctatctttaatcttttatgtttatttttcaaatttttcagaagcttatttgggaagaagggtgctatttattggggccaattcagagacctaaactgtaactcaaagatcagttctatgaatatagaatacagaaatccaatcatcattgcatgagagagtgccaagttcaagccaatcagctaaaaggcaaatctcaatgttttgtctctcaaaacactctctgcataaagaccttggacatactagtttaaccaatagaaaagcttgtcagggccaggcatggttgctcggcctgtaatcccagcaatttgggaggccagcatcgaaggatcacttgaggccagaagttcaagactagccaaggcaacatggcaagacccgatctctacaataaattaaaaaaaatatattagtagggcatggtggcatgcgcctgtcatctcagttagtcaggaggttaagttgagaggatcacttgatcccaggagggtgaggcttctgtgggctgtgattatgccactgcactctagcttgagtaacagagcaagaccctatctctaaaacaaaacaaaacaaaacaaaacaaaacaaaacaaaacaaaacaaaacaaaaggctaatgagcattaaacctacagaaaggaatctgagcagaaaaagccaatggtcaatgatagggaatcctgatttcttactgacacccaaaacactaataaatctcttgatgatgtatgagttgctgttaccttgcacagcagtgagcagttctatatggcaattgctcagttagctctcaacttcctgaacagcagttgcagttattcagccttgctcttaagcgttagtctgcatgctgagttttagactagctaactgttagaaaaggtggatgctgagacctgcagagggaagttctcatgacacagatgtatgtgtctcaaaaactgttttctcccagtatgtagcctccagagagattccctgcctggcttggctctggggtgaaggaggctggtggttttcaattaaatgcttataaaatattttagaagaaacagggacagattgtaaattataaaaatgaccacagaagtatttccagccccatctgctcttccagaaccttgtcactccccatgaaaaggtagattttatctgggtagggctttcttactgccttgaggcaaaaatgtggttctgaaagtgatgctgggacataaaagaccgtaagatacttctctggctctttcttaggatgcggttccctggaaactgagccaccacacggtaacgaagctgtgaaaaaagaaatatatatattatatatatatagccatgcacggtggctcacacctgtaatcctagcactttgggaggccgaggtgagcagattacttgcagtcaggagttcgaggccagcctggccaacatggcgaaaccctatctctactaaaaatacaaaaattagccaggcatggtggcacacgcctgtagtcccagctactcaggagaggcagaggttacagtgagccgagattgtgccactactccagcctgggtgacacagcaagattctgtctcaaaaacaaacaaacaaacaaacaaataaacaatatagtaggttgcggtatttccaccacnnnnnnnnnnnnnnnnnnnnnnnnnnnnnnnnnnnnnnnnnnnnnnnnnnnnnnnnnnnnnnnnnnnnnnnnnnnnnnnnnnnnnnnnnnnnnnnnnnnncaggctggagtgcagtggcgtgatcttggctcactgcaacctctgcctcttgagttcaagtgatactcctgcctcagcctcctgagtagctgggtttacaggctcccaccaccatgtccagctaatttttgtatttttagtagagatgtggttttgccatgttggccaggctggtcttgatcacctgacctcgatgatccccccacctcggcctcccaaagtgctgggattacaggtgtgagccactgcacctggcctccactcacagtttttaacacagaagtttcaaaacttttgtaaagagaggtgccaggagaatcttttgttctaatatttggtcttagaccccagttccgtacacagggtttctaagacctttgtaataaccatagtgataggagcatctgacacaaagctcctaaatcccttggaatttcccaggtgataggagcctcttttgttctagtgagctgactcttggtgggctcctgggtgggtactggtcaccagaaaaaccaaggcatgcttagaagcttggaacttttagctccacatctcgtcctctgaagaggggagaggagctagagtctgagttaatcgatcaggcttaccagtggcatttagaaatggtgctagacccaacttctgaggagttggcttattggatacatgaggaaatgcaaaacaataagaaacatactaaacatacaatcctttggttattgttatttataacagcaaaaaatgaaagaaagtacagagctggactttgggtcctgcacaaagctcagttttggtttgaatgagcttcagctattagcctcaaagatgcttgcaaagggaaaaattaagcagggacaacagaaagtatctctggtcaccaagagggcagtcagcttggggaaagggacaagccaagagactactgaaacctgggggtattgcatgaagaagttatctcatcttgtggattgataccatcagctccctgaagaacctttactaacgtggattgtgagagtagctaatttgggggctgtgtcttttgttttgaatgctacagagtggaagcacatgcttgagttgattcaggatccacaggtcactattgaacaatccctctacacagggagttattcctatacagtatggctataaagtgtgtttatcctaaaagtgggattgtaactcccccataaatcccaagtggaacatctcagatgatgcagctgataggcttcatatgcaagctttatgaggagtggctattcgtttgctgaatatgcctgtaactgagcagcttggcttcaaatagcattttaaaactttgctttctgtcctcctttctctccaatctcaagatataactttgagacaaattgtatatgtgttacctgtcatcttgaaatacagccttggaatgtgctgtgaacatccactccttttcttttcctgttctatgctaccatgtctgatgcacgtttatttacctatatgcttgttaagcacacaccatactcacttatctggtcatatgtttccttagaagcttcaggggctggatcctgatatggaccagacacctccagccacaatggcaccagacgtttcaccagatggaacaataacttaagacaagccatcatattggtcatgccacctgatacctcctaggccccctgcctcttctgcattccaaaccttctctttaaaaccaacccccgtgttctcttcacaaattgaagagtggagatttttggaaagtattacaccccttcttccccttcctagcatggataataaaatctcactctctttttgtcacacttcactcttgttatattggcttctttttacaagctacaagcagccagacccttttgccaattacatgcccattatgaggcytatggaaaatgttgtgattaaaggagttccttttccatgggcaccccatgtgtacttctgcaaaatggaacaatagcttgaaaagccttaccagatttgctgtctcagcttcccctgtgggtcttactgatcaaggacattatagtaaataaaaaaaaaatgagagagacaaagaagagagtcatggacttgtcccagcagggtaggagtctttagatggttattgagaaactggatgaatgttgtggatattgatggtgttgaaacaaaagtattaatgcagcactattgaaggttagatgaaccaatgggactttctgtttgtctcccaacattgaaaggctccaacaagttttctccatttaccccagtttggagaaacttaaaaagtcagagattactcagaactggttggggtgacggttaagcaggttaatcaagattgatgargggccagggtctcctggccagacctcaggctggcaggggtcccaaggacatatgcacatgtgtagataaaatggtcagtggaaggagaagagacttttctgggactccttggtataggaggtcaatgcattgtaattccaaaagctgttggtgaagacttaacaggagttaaagttaagattgggggagtatatggagcttcagtggttggtggggttaacatggaagtttggaggacaattggaattcttgaaaaagctttatgtgagttggttgtgtcacctttacctgaatgtattattgggatggatattatgtctgactgcggattgcttcccctacctaatattgttattagaagttatgtaagtcttccctcaggccagttttctttgaatgtgctaaatgagaaccattagaactgcctgaatccacacaggtggttaatttaaaacaatatggagtacctgacagcagcagaggggggtgggggggtggggggcaaaaggacattcacactttaattaatgacatgctagatgcaggagtgctgatacaaaagaattttttgaacaacagccctgtgtggaaaaggaggatggctcatggagaacaaacagtagattattgaggcttaaatacataaatttgtacctcagtacaattttatagcctcagtaattttagtcatgatttcaatcatacaaaaagactgctactcagtgatcgaccttgcaaacattcttctctcagtctcagaaagtgccaaacactgtttgctcttatatgggaaggatcccagtttatgtatactrtgctaccatagggtcatctgaactcactggtttactgtcataatttggtcagaagggatttggatttgatgtaggtctcaagtgtaataatacactatattgatgatgagatgataatattggaaactaaagagccaggttaagactgagttgaatgcagcgatgactcacatgaccaaccaaggctgatcagtaaattcagcaaacatccaaggacttgcccacatggtaaaattcttaggaataacataggcaggagccacccagttccacaagtgactacaaataaactgctgttgttaatcacccccaagaccaaacaagacatctagcatttggttgttgtatttggagtttagagaatgcatattctacatctgaaaatattgctagcttctatacataagactacctgaaagaaaaccattttgagtggggacctgaacaaaagcagaccatgtctgaattacaaaaatcaatagctctctcaatgcctctgggccattatgatctccattcagatgattttggaagtgtctgctaccagtgctcatgcaaactgcagcttatggtaaaagcctgagcacctgggattccagatgctgccgccccatacacatcattcgagaggcaattactagcttgctgttgggctttaattgagacgacctcaatgactgaaggacataaaataatcatgaaacctgagatactgataatgtcttgggtgatgtcagagaaacactctaataagaaaggcagtgcccagaagagctccatgataaagtggaaatggtttatacagaagcatgctactggtggaatgcaaggaggcacctactgtatccataagtagctagcctcaggtcccctaggactgacttcagaatcactggaagaactgccagactctattgccatgtggaagtgccctatgaacagctcttgatgggctgacaaagaactgctgggtttatggatggcagttccaagatggatggacattatgttgtctggagatatgctgtattaagaccagaagatacaaaaactagtttaagaaattaagaacaaattggcttaatgggttgaattacatgccggttttttttttttttagcagtgatggaagagtttaacaatggtaaaagcccttatgtttgggtttttataaactcatgggcaatagccaatggtctggctatgtggtcagatagatggacaatggaaaactgggctattgaagggatggtcttatgtggtgtggccttatggaaattactatgggaaattaaggggagcattgaagaactacttacaggttcaggaggtgacttaaaccatcatatagacttattgatgctctcccatgaggtggtgagctgggtccatgaaataagtgaacatggtgtgggggttacagccatgcagaaatggactgaatgtagacatattcctcttcactctctgaagcacagaatgtcaccaagaactgtttcatctgtcaacaggagagatagagattgcagatggctacagagaagattctacatggggaaggccccacacatagctggtaagtggattatattagaccaatgccagtagcccctgggagctacaaatgggtcccagcaggaatagacacttactctggactggtagtaaatgcaaatgctgaaaatactatttaaagattggaacagacaatactgttccaatttggctcatcaagctacatttctttagcccaaggatgcactttacaacccatagtgtccaacagtgagcaaagaaatactacatcaaatggacatattatgttgcatatcatcctcagggtaatcgtttaatagagaattggaacaggcaattgaaatatttaccacctaaaacaagagaagacaaaggcatgagggacttgccttcatgagtgtgtgctcacactcaacatgggggaggataaaggaaggctccccctggatagatttctcacttttctgggggatctggcaaagcaggggtggaaatctccctcctgctgccagtgtggttatatgatttttcccatataatctcactttttttttgtcccagtaagaagcactggagcactgcctgatgccaagggtcctaggaccagggatgtgactgtgtacatcctcgtaagcaaggatgatttctaggcaagaargtgtaactaacttttaaacatctatgccagaagtcctaagggcctgatagtgtgaattcacatctgtgaatattgctgtgttgcctagggattgggctagccctgacatccccgataggacagttctgtacccaggtaacctgaccctatctgaatggaaatggactgaaagggaggcatttgttagactagcatcactgtcagcaatggccctcccaaagatggaaaactctgggtcagaataaatgacaaatggagagaaggagtaatagtagccgggggtaaaggaatacagtgcatacatgaggtatgcaacaagggaaatgcaacattgtcttaatacctcaggagagactcagatcaggatattatttcttagcacaattatgaacagatgtttggaacggtgaagctgtatgtttgctgagaccacccctgcttttggaacctttcaaggttgaacgacagcctgcaaacctgaaaggcatagttctgggagccattctggtcatatggtatgatgatgaattagactgttaatgaccaaatgggactctagtaacgtatcagtggtatcttttgacttctatattttaggctacatcaactacaaaggatatcttttggggaggaagttttgaggactgctttctactgagacttcaatctatgtggtgtatggctctcaacagactgatcactatggtaaccacaaaacctacaaaacctgatggtcaaatgcttagaaaggtccttggttatgatagaaaaaatatgatggtagcatgcccaacatagcatgcatttaggctatgcataaatacataccactcttgtttttgtggacagaaagctattaagcagtatagggaaaaacaatgggcctctggtaggattaaagaagttggcatcacattgtagatccaagttcccctggggaatgaccccactcgaaataaggaaggctgtgagaggccttatggcacactcaaattaaattacatctacctgtaaacaccaatcatctaactctagtgtggggacccaaaattttttgcaaaacatttatcctaactgcattcgygccattagtacgcaataccaatgatatgcatggtagattaaacaacactggctcctaagacagaaaagggcctcaggagagataggtgcaggtctaggtatcctgggacaagctgagtttactcttaatgtggagcagcattcggaggaaaaagatttattaactagaagagacagaatagaggaaattctcttcaaggaggaaggcaaaggatggagtcggggcggaaagataatgaggctttagcgaagtggatcaggccaactcaacaaacaatgctgggcactgctaacacccagcccaggggaaagggcttgtaccctgacccaataggacctcttgactattttaatacagatggaagctgaagtggccatggggcagtgacctgctattctggctgctgaggtccaagagacccacccatgggagtctgatggccttccaaacttatggaagttctctgagggcacttgtagttttacactgatagactatgaatgctctcacccacagcatagatcaaaatgaaatacatcctgcagtacagttggtagaaatgggaaccactctgaataccacctgtgtcctccctgcaagaaggaggtgggccttgctatctaataatacacaatggaaaccagcctcagtacaagcctgtgagatgaggtggggtggttctttttgtcctcaattaactagaaacccagatataactaaaccatggccaactgtaataatgcccttccttaataatatctgacaaatggacaagagtagattctgttgggaagacaagacaaattcctctgtaattcttacttatttgttcttttatgaaactgagttgtcccatgaccatacggtgatatggtgtcatactggtgctgtaagtaagattcaattacctggtataaataaatcttatgatactactgatattggtgactcaatgtaatgggagattgagttaaagtctctccaggatgtaatacttatggaaaataactgacttgaagagaaattggatttagctaaccatcagctgatttttctgctaaatagttctgcaaagcttattacaagacacaaatagcaatagaatgcacaaattagtacaagaatatgaaaatgttggttatgattttataggataaattagctgttcctttaaatctatccctactccaccctgggggttcagagagcttctgggtaataagtacatctgtgtgctgggtgagggaggcacacccctattccatgaggacagaaacctccataaacaggacccttctacaccttgccctgtgtatctctccgtttggctgttcatttgtatcctttaaaaaggactaagaaactcactcaaaaccgctcaactacatggaaactgaacaacctgctcctaaatgactactgggtacatagcgaaatgaaggcagaaataaagatgttctttgaaaccaacgagaaaaaagacacaacataccagaatctctgggacacattcaaagcagtgtggagagggaaatttatagcactaaatgcccacaagagaaagcaggaaagatctaaaatggacaccctaacatcacaattaaaagaactagagaagcaagagcaaacacattcagaagctagcagaaggcaagaaataactaagatcagagcagaactgaaggaaatagagacacaaaaaacccttcaaaaaatcaatgaatccaggagctggttttttgaaaagatcaacaaaatggatagaccactagcaagactaataaagaagtaaagagagaagaatcaagtagacacaataaaagatgataatgggaatatcaacaccaatcccacagaaatacaaactaccatcagagaatactataaacacctctacacaaataaactagaaaatctagaagaaatggataaatttctggacacatacaccctcccaagactaaaccaggaagaagttgaatctctgaatagaccaataacaggctctgaaattgaggcaataattaatagcttaccaaccaaaaaaagtccaggaccagatggattcacagccaaattctgccagaggtacaaggaggagctggtaccattccttctgaaactattccagtcaaaagaaaaagagggaatcctccctaactcattttatgaggccagcatcatcctgataccaaagcctggcagagacacaaccaaaaaagagaattttagaccaatatccttgatgaacatcaatgcaaaaatcctcaataaaatactggcaaaccgaatccagcagcacatcaaaaagctgatccaccatgatcaagtgggcttcatccctgggatgcaaggctggttcaacatacgaaaatcaataaacgtaatccagcatataaacagaaccaaagacaaaaaccacgtgattatctcaatagatgcagaaaagtcctttgacaaaattcaacaacacttcatgctaaaagctctcaataaattaggtatcgatgggacatatctcaaaataataagagctatctatgacaaacccacagccaatatcatactgaatgggcaaaaactggaagcattccctttgaaaactggcacgagacagggatgccctctctcaccactcctattcagcatagtgttggaagttctggccagggcaatcaggcaggagaaggaaataaagggtattcaattaggaaaagaggaagtcaaattgtccctgtttgcagatgacatgattgtatatctagaaaaccccatcgtctcagcccaaaatctccttaagctgatagtcaacttcagcaaagtatcaggatacaaaatcaatatgcaaaaatcacaagcattcttatacagcaataacagacaaacagagagccaaatgatgagtgaactcccattcacaattgcttcaaagagagtaaaatagctaggaatccaacttacaagggatgagaaggacctcttcagggagaactgcaaaccactgctcaatgaaataaaagaggatacaaacaaatggaagaaaattccatgctcatgggtaggaagaatcaatatcgtgaaaatggctatactgcccaaggtaatttacagattcaatgccatccccatcaagctaccaatgactgacttcacagaattggaaaaaactactttaaagttcatatggaaccaaaaaagagcctgcattgccaagtcaatcctaagtcaaaagaacaaagctggaggcatcacactacctgacttcaaactatattacaaggctacagtaaccaaaacagcatggtactggtaccaaaacagagatatagatcaatggaacagaacagagccctcagaaataatgctgcatatctacaactatctgatctttgacaaacctgagaaaaacaagcaatggggaaaggattccctatttaagaaatggtgctgggaaaactggctagccatatggagaaagctgaaactggatcccttccttacaccttatacaaaaattaattcaagatggattaaagacttaaatgttagacctaaaaccattaaaaaccctagaagaaaacctaggcaataccattcaggacacaggcatgggcaaggacttcatgtctaaaacaccaaaagcaatggcaacaaaagccaaaattgacaaatgggatctaattaaattaaagagcttctgcacagcaaaagaaactaccatcagagtgaacaggcaacctacaacatgggagaaaaattttgcaatctactcatctgacaaagggctaatatccagaatctacaatgaactcaaacaaatttacaagaaaaaaacaaccccatcaaaagtgggtgaaggatatgaacagacacttctcaaaagaagacatttatgcagccaaaaaaaacgtgaaaaaatgctcatcatcactggccatcagagaaatgcaaatcaaaaccacaatgagataccatctcacaccagttagaatggcgatcattaaaaagtcaggaaacaacaggtgctggagagggtgtggagaaataggaagacttttacactgttggtgggrctgtaaactagttcaaccattgtggaagtcggtgtggcgattcctcagggatctagaactagaaataccatttgacccagccatcccattactgggtatatacccaaaggattagacatcatgctgctataaagacccatgcacacgtatgtttattgcggcactattcacaatagcaaagacttggaaccaacccaaatgtccaacaatgatagactggattaagaaaatgtggcacatatacaccatggaatactatgcagccataaaaaatgatgagttcatgtcctttgtagggacatggatgaagctggaaaccatcattctcagcaaactattgcaaggacaaaaaaccaaacaccacatgttctcactcataggtgggaattgaacaatgagaacacacggacacaggaaggggaacatcacacaccagggactgttgtggggtgggaggagggggagggatagcattaggagatatacctaatgctaaatgacgagttaatgggttcagcacaccaacatggcatatgtatacatatgtaacaaacctgcatgttgtgcacatgtaccctaaaacttaaagtataataataattaaaaaataaataaataaataaaatgaactttgtaaaagcctttgtaataaattggtaatagtacgtaaaccattttcctgggctctgtaagctgctttagcaaattgtttaactcaggaggggattatgggaacctctgatttgtagtcaagctagacagaagttgtggggaacctgaggacctaccacttgtgattgaatctgaagttgggggcagtctggtggggctacagccttaacctgtgcagatactaattccagttagtgtcagagttgaattgaatcataggtcatctagctggtacaggagaattgtacagtgtgggaaaaaaaatccatatctgactacagtagtgtagagtgtgagtayagagaaaaacagttgatttttcctatacattttatgtcagaagtgaagcacgtattgagaatggtgtgagtatagaaggaaaagcagtttgtgtttctctatatacaagcccaggccacatggagagatatgtgcaggtattctagccgacaaccccagctgaggtctcagctgatagaatcaacctccaactataagtgagtaaaccttcaaatgcttccaggcctcagcctttgaaccccagccaatcctgggtggaacagagatgagctaacctaccgagcctgctgaaattgcagattatgcgaaaactaaatatagccgttattttaaaccactgcattatgaggtaattattatgcagccacacaaacaggaatggaacccattttattcaatgacagcttctgccactttgctgaagccttaatcatgaattatatggcaagaagtagatttacatttatgaayaggtcaagaggaaagaaatgaagtcttgttagaacaactgtgtttctggaaaaactttttctctggtaaaagtttcagcaattgtgttagtttctcgtggctgtcgtaatgttaccaccaatttggtggcttaaaacagcagaaatttatgctctcacagttctggaggccagaaatcagaaattggtatcactggtgacaccatgatgaacctggacaacattatggcaagtgaaacaaggcagacacagaaagataaatacaggctgatctcattcatatgtgaaatctcagaaagttgaacccataaaattagagagtaaaatggtagttaccagaggataggggaggggagtgaatagsgaaagggaagatatcgattaaaaggtacaaaatttcagctagacaggaggaatacacttagtgattcattgcacagaatggtgactataataaataataatgcattgtgtatttaaaaattgccaaaagagtagattctaaatgtttttaccacaaaaagggtaagtatggtaattagcttgatttgatcattccacaatgcaaatatatatcaaaacatcacattgtatctcataaatatatataaaattatttgttatctcaaaataaaataaaatttaaaaaataaatcagtatgactggtatgaaaccaaggtgctggcagggctgtggttcccctggaaattctagaagagaatccattctttgccttttccagcttctgtctgtggataccagaattccttggcttatgtctacatatcattccaatctttaagagtgccatcttcatatctctttcctctctcttcatatccttttttctgtgtgtcaaaccttcctctgccactctcttataagaatatatatgactgcatttagggcccactggataatccaggataatctccccatataaaaatccttaatttaatcacatcttcaaagatcctatttctctgtaaggtggcatgcacaggtgcctgagattaagacctaaataacttttgggagccaattttcagcctcacattgcaaatatttttccctttgtattattcaccactgtaacttttattattaaaatgttgaacattcttgcacacatacattgttaagaatatatttttaggaaatattgtgaacattattaagaataatacacataacccagatttattaatattttaagattttgccatatttgcttcaggatttttcttaaattagttaacactttatagaaagagctggagctgtatgtgtacctctttcttcttccttagaggtagccattatcctgactttgtcatttatgattcctatggatgtttatagcctatttctacatggaagaggagggaacattactctagatatcaaacctagacaaagatatcataaggaaagaaaactaaagatcaatatcttataaatatgaacacaaaaatcctcaataaaatactggcaaacaaattctagaaacatataaaaggaattatacaccatgggtaagtaggatttattccaggaatgcaaagttagtttggcatctgaaaattaattagtataatatattgtatcaatagaattaaaaggaaaatgtatatgatctcaatagatgcaataaaagcatttgtcataattcaatactttccaagaatttatacaccaycaacaacccattaacctaggaatggaagagaacttcctcaatttgataaagagcatttataaaaagcccacagctaacactgtacttaatggtgaaagactagattattttctcttaagatcagaaacaagactctctgactgcttctatttgacattgtactggtggttctagtcagggcaatgaggcaagaaaaagaaataaaatgctccgagattggaagggaagaaataaagctatctctacttgcagatgacatgatgttatgtacagaaaaatcttaagggatccaccaaaaactattaaagtgagttcagtaagcttgcaggatacaagatcaaaatgaaaatatcagttgtatttttatacacctgaaataaataagctgaaaatgaaattaaggaaacaattctatttgcagtagcaccaaaaataataaaatacttggaataagtttaacaaaagtgtgtaaaacatattatctgaaaactataaaacattattggagaaattaaagaggatctaaagaaatgaaaaaaatgttccatgttaatggatcagagggcttaatatggttaagatggcaatactctccaaactgacctacagatttaataatatccctataataacaccagctgatgtccatagaaattgacaagatcagtctcaaattcacataggattgcaagggactcaaaatagccaaaacagatttgaaaaagaacaaaatacggggacttacactttcaaatttctaaacttactacaaagtaataataatcaattggtgcttatgcaatatggtagtgacataaggctgggtatatatatcaatagaatagaactgagagttcaaaaataaacccatacatctatggtcatctgattttcaacaagagtatcaagaccattcaatggggaaggaacagtcttttcaagaaatggtgctgggataactggatagccatataaaacataatgaaattggatccttacctcatgccatatacaattcaattggatcaaagacttaaatgaaagtgctaaaactgtaaaatacttagaagaaaacataggagtaaatcttcataaccttggatttagaaaaggattctcacatatggcaccaaaagcacaaatagcaaaagaaagctagatgaatcagacctcattaaaaacgtttttgcttcatagcagcagtccccaaccctttttggcaccaggaagtggtttcatggaagacaatttttccacacactggtgggtgatgtgggggctggttttgagatgcaactattccacctcagatcatcaggcattagattctcgtaaggagtgcacaacctagatcccacacatgtgcagttcacaatagaggtcacactcctgtaagaatctaaggctggcactgwtctgacaggaggtggagctgagatggtaatgctcgcttgcccaccactcacctcctgctgtgaagcccgattcctaacaggccatggactagcatctagccatggcctgggggttggagaccccctgcttcaaaggacaccttcaagaaagtaaaaagacaggtcaaagaatgasagaatatgtttgcaaatcatatatctgataagggatttgtatctagaatatatacagagcatgtacaacccaataataaaaagacaacacaactaaaaatggacaaatattgaaaaccggaacaccacaaggatgcccactctcaccactcctattcagcatagtactggaaatcctagccagagcagtcaggcaagagaaagacataaaaggaacccaaataggaaaagaagagaaaagtcaaactatctctctttgttgacaatacaaccctgtacctagaaaaccctgaagactctgccaaaggcttgtggaactgataaatgacttcggtaaagtttcaggatacaaaatcaacatacaaaaatcagtagcatttctatacaccaataatagtcaagccgagagccaaatcaaacaggcaattccatttacagtagtcacacacacaaaaaacacctaggaatacatctaaccaaggaggtgaaagctctctatacagagaactacaaaacactggtgaaagaaatgagatgacacaaacaaatggaaaaacattccaagctcatatactggaaaaatcgatattgttaaaatggtcatactgcctaaagcaatctatagactcaacactattcctatcaaactaccaataacatttttcacagaattagaaaaaactattctacaatgcacatggaaccaagaaaaagcccaaataaccaaatcagtcctaagcaaaaagaacaaagctggaggcatcacattacctgacttcaaactatactataaggctacagcagccaaaacagcatagtacagaaatagacatatagaccaatggaacagaatagagaatctataaataaagccacacatcagcagccacctgatctttgacaaggtcaacaaaaaaaaggggaaaggactccctgttcaataaatggtgctgggatagctggctagccgtatgcagaagaatgaaactgtaacccttacctttcaccacatataaaaattaactcaagatggattgaagatttaaatataagacctcaaaatataaaaatcctagaagaaacctaggaaacaccattctagatataggtcttgagaaaatgtatgactaagtccttaaaagcaattgcaacagaaccaaaaattgacaagtgggacctaagtaaaagaaagagcttttgcacagcaaaataaactatcaacagagtaaacagacaacctgcagaatgggagcaaatattaaaactgcaatgatataccatctcacaccagccagaatggctgttattaacaagtcaaaaaactgatggtagtgaggccatggagaatagggaacacttatacactgttggtgggaaggtaaattagttcagctactgtggaaaacagtttgaagatttctcaaagaacctaaaacagaactagcattcaacctagcaatcccattactgggtatatacccaaagaaaagaaatcattctgccaaagacacaagcacttgtatgttcatcacagcactattcacaatatcaaagacctggaatcaacctaggtacccatcaaaagtggattggataaagaaaatgtggtacatgtacatgatggaatactatgcgccataaaaaagaacaagatcacgtgctttgcagcaacatggatgcagcaggaagccattatcctaaacaaattaatgcaggatcagaaaaccaaatattacatgttcttataagtgggagctaaacattagctgtatgtgaacatgaaaacaataaacaagggggactactggtggggaagggcaaaggttgaaaaactacctattggctactatgctcattacctaggtgatgggatcaatcatatcccaaacctcagcatcatgcaatatacctatgtaacaaacttgcatatgtatcccctgaatctaaaataaaagttgaaagtatataaaaaggatatattatctgattaaacatctctccaaaatagaatatacaagtgtcccataaatatatgaaaagatactcaatattattagttattagggaaatgcaaataaataacacaataagctactaatttgcatacattaggatggctacaatgaaaatgtcagataataacaaatgttgtcgaggatacacactgttatggtttgaatgtgtttgctccaaaattaaggtgtttaaacttaatggccaatgtgatgatattaagaaatagagcttttaagaggtgattaagccatgaggaatttgctccttgtgaatgtgattaaggcctttataaaagaggctccacatagcattcagttcatttgcccttctaccttccactatgtgaggacacagcgttcctctcttctggaggatgcagcaacaaggcactatcttggaagcagtgagcagccctcaccagacaacagaacctattattgcatttatcttggacttcccaacctctagaattatgaagaaataaatttctattatttatgaactatccagtctttggtattttgttatgacagcacaaatggactaaggcatggacaagcaggaattctatacactgctggtgggaatgtaaaatggtgtggctgctttgtaaaaacaatgtagcacttccttaaatgattacattcagagttaccatatgacccagcaattccattcccagatatatacccaagagagattaaaaacatattcacacaaaacttgaacctggaagtttatagcagtattcatcatagccagttcctcaactaaaatgtggaaacaacccaagtgtaagtgaatggataaatagataaacaaaatgtggtatattcgtaaagtgaaatattgccaggccataaaaagaaatgaagtacatactgatatacatactttcagatccaaacacaagtatgtgagaattctgttgttccagactttaccaccacttcacatcatcagacttaaatttttgcctctctgacggatgtgaaatgtatctgttttgtacttccttgactattaaggctgaatgtcttttcatgtttattgactatatgagtttttttttcttccataaatatcctgttcacatgttttaactatttctttttctgcattgtttgtcttttctaattgatttactggagtatttggagaccccaacctgggcactaggggttcacatagctccctgcttgtccttgtttctaggcctttttgtgaactacggtttttactgatgctccaaattcacattcaggcatagggttttaaaataaatgtgttaaactcatatctccaactcctttccctcatacacacaatagttttagaataacaatgccatgtgttctacaataataagagaagtgaaaattatttaagagcatttgccctattgtttttctaattctaaaagaaatacatatttaatatggaagagttataaaatagaaaaatcataaagaacaaaagttatttataatccartaacccatgtattatcaatgtgaacattttggaacatttgttattcttgaaaatggtttagatagtaaacttttgaatacaatgagcacctgtcccattatgtattttaaatgggagaataatgatgtgttctcagcttatataaaagtcccgaaccattcttcaaatattactaaaatattcttaagcatctatagaaaaattgactggaatttctgcaaacttaaagacattttaaacactgttgagttaacatttgctaaaatcataggggggtatatttgtatgttttatgaaacaatgttgcataacattggaaattaaaattgtcttttgcattgcaaagaacatgtactataatgtaaatcaaattattaaatatggttaggttgcataggaatgcaaataatatttagcaaaatgaaacaagtcaaagcaatttttaaacaaaatatttaattgtcaactgaatagctgcctgaatgtggtgggtaaagagaaatggaggacatagtctgttcctgtttgcggggtgaagggttggttggtggtggcttaagagacatgtgagtgaactggagatgggatgaataaaacagtaaatatattatgtttgttcttatttaaattcaagaaaccagatgttcaggcttctcttgttgcactcaagacatcagaagttggtgtctattttccataattcattaaagagaaatgtgcaacctcactcttagatttgcagtatctttattccagagaattctctttccttgatggagacctacacaatttcttttttgttcaatctatgaaattaggatcagccaggtggtcagcatgactaattttacttcttatacaagtagcattaagggaaatgaatgcctaggttttcattttctgcagggcagatgctggctagttaagcttgcctgtaaatcatagtttgtccataaactccagcatattctatttagaaccacagagcgaaaaactaataaatacatttaaaaatcttagtagacattaactccagagaggttcttaatttttaacttgatcaaaattttagctatgtcttagtggtttggttgaattwtaagcagatattgagaactcgcattgctttataaaatgcttgggccgcatgtggtggctcacgcctgtaatccmagcactttgggaggctgaggcaggcagatcacttgaggcgaggagttcaagacgagactggccaacatggcaaaaccctgtctctattaaaaatacaaaaattagctgggcgtggtggtgggcgcctgtaatcccagctactcgggaggctgaggcacgagaatcgcttgaacctgggaggcagaggttgtggtgagccgagatcatgccactgcactccagcctgggcaacagagcaagactgtatctaaaaaaaaaattcttaatatgctttataaaaatggacattccataaaatagttctgatttgccgaacaaaacctttttagtataaaacataaaggcgtgggtgcattataacaggtttctttttcaagcaaggtttagagtaaagagatacaaaataaatggatctatatctacgttgtgtggtaatactctaattcctacttactcttggattggggtcctgttgaattctgaagtcttggtggggaaatggtattgatgccacttggaaggaacaggtccagtaaaagttttaataggatggactgcattcctctttctataaaaacatacccccaggaaaagggatcaaggtccattaacctaatcaccatttccacactgtgagaagaaaataggctgttattttttattttttgccacagtgattagtttaagctctcacactctgggtttctgaggtctaatgtctgtttccatgggaacggcagtggcaggcagctgctaagttgttagacatctaataatctggggaagctcctgtctgaatgcaggccaagtttctccagcatcttgggtcatttagtcacaagtggctgtgcagcctgtagagacatcttggaatatagggagttgaaatacttgctatattgaaattatatatataatttttttattcatttaatggagaagcattgagtaagaagtgatttgaggccaggcatggtagctcatgcctgtcatcccagcgctttgggaggccaaggagggcggatcacttgaggtcaggagttcgagaccagcctggccaacgtggtgaaaccctgtctcttctaaaaatacaaaaattagtcaggactggtggtgtgtgcctatagtctgcactacttgggagactgaggcttgagaatcacttgaaccagggagacagaggttgcagtgagctgagatcatgccactgccctccagcctggccaacagagagagactctatcttaaaaaaaaaaaagttataaaaaasaagtgatttgaaaaagaaaaagggctttaggaaggacacagaatataaacaaatctcctgtcctcatgacacttaagatttatagggattcctaagtctcctgtactgcatactcaaaatgcagggtcctaagacttacaggaaatattatactcaaatgcactttcttcattcctgtcttgaccatctgtgctgaatcctcacctcttttcctattctgtgaactgggatgtataaacgaataagaaatgtaaatatcctggctgctaattccttgtaagtctagaaagtggttaggtatttgacttgtctcctctggttcttaccctggccattcttgttgctaagaaggaatgatgtctcctgcaaagagcccaccaaacacatttctaccctaagtagcctgctcaaaactcatcaaaagccctactaagaygttttgctgcactgaaccctttcattttatagtttcctcatttagaattccctttcacacgtccattcattcattcaacaaatattaagggtctactatgtgccaggcctggtagtaagaatttggtatagacataatattccttcaagaagcttaaagccaggcacggtggctcatgcctgtaatccccacactttgggaggccgaggtgggtggatcacttgagcccaggagtttgagaccagcctgggcaacattgtgagaccctgtctctataaaaaataaaacaattatctggatgtggtggcacatgcctgtagtcccagctactcaggaggcggaagtgggaggattacttgagcctggggaggcagaggttgcagtgagctgagattgtaccattatgctccagcctgggcggtagagccagaccccttttcaaaaaaaaaaaaaagcagcttagagcttgatgggaaaaagctattacaggaataaatgcaaaacttgttatacaataacaggctacgttatgtattatgaggtttctgtggaaaaagaataagggatataacctaatttatattggggttgggttcatagaggctattttctacagccaaaatccagatatagagtctaaaatacgtggagtgagatggacaagagaaagaaagtgtcttgaattggttttttcccccattgtctcacatctctttttgcctttgcagtcacatcaattgagcatctttatggtggcccatttgtgctctttcatcagtttatgtcttcggttgcttaacagattcctctttgaggaagctgagattatgggggagggtttgagagcagcgatataggcacttagcaagaaaataacaacctacaggagcctgtgtgttataggagccttacagacagcaagggtgcataaagtcaatgttgagatggctaaggcaggcttcattgagaggaaaggacataggctcggctaagaaatttcttctctatccactgttatgttctgaaccagcagctatcaggtccagaggttttctagctgtaccctcttctctcccctgtggcagggcagatgtagtatccagggtggcctggctgcaggtcaccaatttagaactcatatgatggtccttggcaggtgcatggcaacgtaatccattcaatcacattgcacagtgataagtcactgcatgtgcgacagcagagaatgagccccgcctgggaaatagcctgtatctttccacttgtcctgactgattaacaatttatgctgcatgagtagaaaataattttgacctcattcactttattgcttgtgaaatcatggcagtatccatagactttttgcttaaacatttatattagtaggcatttttgtgttttcacatggctgcatgaaatgaacaggcacttttctaatatgaacatacagtgaatgaattaataactgtatgtttctaagagccacatttctgttagaactagccatataaggcatatgactaatgaattcagatatttaatattgaagtttaggaaaatgtcatttccactgggctgagaattagagtcaggagcaaatcttyctatctccctctyctacacattcattcattcagcattgtgtgcctattatatgtcaagatagtataatgtatatatttaatattatatatagtatagtataatacatattggcacataaatatgttttttatatatatataatcatcgayagtaacatgtttataggcaatagcaattcaatgtggcaagttttatgacaaggccatacacaggatgctatggagcatggaaaggaaggagtccctgagaacatgtcatcgaaactgacttcaaatggagatgtaggtatgagctggttgttagaaacggaatgtttgtgtcaccccgaaattcttgtgttgaaaccctaacccctagtgtggctacatttagagatggggcctctaaggaagtaattaagtttaaatgaggtcatgggagtggggccccaattcaactggattagtgtcctcataagaagagacatcgaaagccagctctctccctctctgaacatacacacaaacacgaggccatgtgaagacatagcaagaaggcagctgtctgcaagctgggaagagagccctcaccagaaactaaatttaccagaatcttggagttttagcttctgaactgtaaggaaataaatgtctgctgcttaagccaccaagcctgtggtattttgttatggtagccttagcaggctaatacagtggtaaactctgcatatggaggagttgaaaaagagagagtagatggcaatttgggcagaaggggaattacctgcaaatgttcaagggagtggagataattcttcttaaactgtttatcagtccttcaggagataagttaacaacagaggataattatcccagagarctggtttctggcaaatgtctgaagggcatggtaggtcataaaatacccactggtggtattttatattctgaaaaccattttaatctacctttcatgacctggatgcttcagcctcctgtgcttcctcagaatttgataactgacccatgagacaaaaactgatcktttatctagaatcctctagattccagtacaactcagcagctgtgaagcctctaaatttgcaacttgctttcttttaaactcagtagaatccctcagccagaaccaatcctcatgccaattttagaactgttcgatattcccaagaaaagaaaatggctggtgattgtcaactctcttaagaaagtctcttattttgggggggtggggtgagggggtgggggatggactctcactgtgtcacccaggctggagtgcagtggtgtgatcttagctcactgcaaactccgcctccgggttcaagtgattctcctgtctcagcctcccaagtagctgggactacaggcacacgccaccatgccctgctaatttttgcatttttagtagggacagggtttcaccatattggccaggctggtctggaactcctgaccttgtgatctgcccacctcggcctcccaaagtgctgggattacagctgtgagccaccgcgcccagctggaaatgttcttttgactctgaaattttagttcatcgagtccwcattgacttcacagctctctggtatctttaagtgtattatttttgtaatttatatgcttttttttcctggttactagcaggaacattgatccaccataaccaatttcatgtttctgagaagtgaagctcattttctgttaaagagaaagagagacatgaattccaaaacaggtaaaggtgtctataaaccagtaagtttattttagataccaagcaaaattctagaacttattatttataaggcagatggagagttattataaagggcacagtaaaaaatgtctaacataggattatcgagagcatatcatcactaaatagttctattttttttgacaaggctacagaaaaatagataatgtctatctgaaattcagaaagacatttgacaaagtttttcataatatccttattgccaatataacgagatgtgaagttaatactaatacgttcagatggatttagagtcaaaagattttattttataactttttaaagagaacagtgtgagtttgaagacatgtttctgtgagtggagtacaaagcttgttatcaaggaaactgggtggattttaatcaatgagtttgatagagacagagcacacagatcatgtaaagttggagagaatgccagtaaattgaaagacagaatcaagaaccaaggtatcttctgtaagctgcaacaaataacacttaatgggtattaatgtcatatcctacatttggataaaataaaaactgttaaaatgcaggctgagaaagacatggcttaataagaatatgtgttttaaaaagccttgggaagtattgttggcttgagctcagaatgagtcaacagggtgacatggccagcaagaaggccagtgggatttatagcaatgctgagaagggcagagggtgcagattgaatatattgcactggtgagtgcattatcctgaatactgcatggacgcgtgctgttgcattctgctctgagcatcatactttaggaaggaggaccatatatgaagcttgccagaggaaagtaactaggatataaagcatgagggaatgtaaagacatgtcaggaaaagagttgaaggataagagagtgtctaacttgggaaagagaggctttggaagatggaagaggtatcttccactgcataagggattgctttgttattgaggtcagagctaggacagaaatatagagaaaaaggttttattgctaaagtgcagaggaacattttcaaaatagtgataggtatgtaaattttgaattttgaatgagaccacttagcgtagtgatgacgatttaggaatttttttttttttttttttttttgagacggagtctcgctctgtcgcccaggctggagtgcagtggcgggatcttggctcactgcaagctccgcctcccgggttaacgccattctcctgcctcagcctcccaagtagctgggactacaggcgcccgccactacgcccggctaattttttgtatttttagtagagacggggtttcaccgttttagccgggatggtctcgatctcctgacctcgtgatccgcccgcctcggcctcccaaagtgctgggactacaggcgtgagccaccgcgcccggcccgatttaggaattttaaatcaggaaaaaatttaatattggaccctcttgccacttacaagctctatgattttacctaatcttttggattctcagttttttaaatctttaaaatgagaataatagtactgtttgttaagggtcattaggtgatcaaaggaaataattcatataaagtgcttgccatggtgaatcacacatttctatatgcttaatatgtatgaactatgtttaagttactgagatgtggtcagaaagaaaagcaagcacctggctgggcatggtggctcacgcctgtaatctcagcactttgggaggctgaggagggaggatcacttgaggccgggaaattgagaccagcctgggcaacatagcaagaccccatttaaataatatataaaaagaaaagcacttgccccttacattggcaatagttttattgcaggaagtaggaaactaaaccccaactcagaatttagacttgctgccagaaaggtaggtgccaggggagctgatgtaatcaagtgtcaccaattagagtctacagatcatgaaaagtaattctaggagattttcaaatgccttttttaacctagatcttctgcttggatgaattcatactatgaatttaggaaacatcaattcatttattccttctaggtggccagcattttaacaaaattacacatgtgtatacaagcatgcatcctggatttggtgagcacacataatttcaaatattctactctttgttccttaacatacattatcgttttaagattgatttggctggaaaatacaaccacagtttatgtatgtcacattctttttttttttttttttttttttttgagacagagtctctctctgtcgctgccaggctggagtgcaatggtgcaatctcagctcactgcaacctccggctcccgggttcaagcaattctcctgcctcaacctactgagtagctgggactacaggtgccaccatgcctggctaatttttgtatttttagtagagatgggggtttcaccatgttggccaggatggtctcgatctcttggcctcatgattcgcccgccttgcctcccaaagtgctgggattacaggcatgagccaccgtgcccagcctatgtcacattcttgtggtactgagattgtcaaaattcttttctgttaagaagcatggttcaaacctactgtgaggtactattttgcactcacaagttctgcaaagattgatgtaataaatggaaaggatatagggcaatggtaacttgaaactgctgttgggagagtaaattggaatattcattgttttactgctctaaatgttctcatcacacacaaaaaataagtatgtaaggtgatagatatggtaattattgtgatttaattgttctacaatgtatactatatcaacacattgcacaccataaatatatacaacatacatttgtcaattataaaagaaaaatattggcaggaaatattgtgtatagaatgatatatacaatatgattctacttatataataagttagttataaatcaatagttatgcctatgggttttaaaatatggagccaagacttatgtcttgtcttttttataatagccatcctaatagatggaaggtgatatctcattatgattttgatttaagttttcctgatgaattgtgatgttgagcattttttcatatacctgtgggccattggtatgtcttctttttgagaaagggctcagatcctctgcccattttttaatcaggttatttaatttttgctattaattctatacattctattagtttcttttatattttggatattaactccttatcagacatacggtttagaaatattttcttccattagtaagttgattcttcactctgttgattgcttcctttgatgttcagaagccttttagtttgatgtagtccactttatttttgtttttgttgcctgtgcttttggggttatatccaaagaaaacataacccagtccaacatcaggaagatttttccctgtgttttcttctgggagttttatggtttcaggtcttatgtttatatctttaatttattttgtgctaatttttgaatatgatttaacataaggattcaattttgtttttttgcatgtggatatccagttttcccaatgccatttattggagcaattatacttgttccattgtatattcttgctactattgtcaaagattggttgactgtatatatgtgggtttatttctgggctctcacttttctaaaactgggtatgataagacctaggtaactaagacggttgggtgagcctgaaagaagggaaagattgccttaggttaggccttatagcttaagaggcaaaaggaagtctcaagtctcctgtttgcttcagcccattaaccaggtttggagatcatacagaaaattaaggtttaagtgctaactagcagtgaaatgtaataaaaaactagttatgactctactgtggttttaaatggataaatgagatcgtgagtccaaasattcagaaactctgatactgttcatattgagagatttaactaaaaataagtttctgctggagagaagaatgaaaggtaagtacagaggaaggcaaggtacaaaggagattttctgagtccagtcagggttagcgtggagaccctgtgcacttggggaaatggaaaaagtggcaataaagagcaaattgtagatagaagcaatgaaggcccaaactggtaatgtcacacttttgctttgagcaggctggtaatgatttccccaggaaactcaactatgcaaataagaaagcttggaagtatgacttaacgattaatgaagctcacactactttgttcaatggaaaatttgttcttgtctaaatgtccagakagtaacttggttctttttctccagggttatgcagaacagaggagacgcttttctgccagctggaaggggtagcaggtggggtaatggattcccagcttgccagcggctgagattctaattagaatcttccttctggcttttagcaagcagctttcacttcatagtgtccttagagaagaaagttccatattcagcaagaaactgccctatttaaatgtataaaatctttttgtgtttgggctataaagcaagtggtcttcaaggttcatggcaagtatatcgtgtaatataaaaagcatcattagctcatgaaaatgctatttaaaaatgcaagtttgccttaggtaataaagttgaagaaagtagtctggaaatttaagacagaattgggaaacttaaaaatttagattttttagtttatatattgtatggattttaatatacacagatgaatggtgaagctggtagaaggagaaagaaaagagagatatggaggtgagggagggtgaaaatgtgcaatagatgatgacagtgttggagaaggcagaggtttttgccataaagaatctctagctgggatcacttgaggccaggagtttgagaccagcttgggcaacaaagtaagaccccagctctataaataaataaataagtaaataaataartaaataaataaataaataaataaatcagctgggcatggtggtgtgcatctgtagtcccaactactcaggaggctgaggcagaaggatcccttgagcctaggagttcaaggctgcagtgagctatgatgtgccactgcactccagcctggggaacagagcaagatcctgtcttttaaagaggaagagagagagactgactccattgggctttttctttttcacgttaaataaaatttaagggtttagttgtttagcctgtactgccttctcctggttggtcttggattagcagctcagatgtaacaaaagtgaactgtgtgaatggacccaactgtaacacagacgttatgtgccagattatgctgcctgcctgttgcagtttaccacggtgctggtaatatatccaggtcccattgggctggcttcaggccgtgatggtctttttttcatgagccttcctattgtgatactatgcatatattagtaagacgtcttaagtagaatacctattccaaaatggaatgaggcacatgtgtgcatactgaggtgcctgtgagttgcttacttctaaaagagagaggttacacaaaatcttaagcccttgtaatgtacttaatcttgtaaatgtgctatgggaacatttattgcaggcctccagagttgactttaatttttcttttatgacctgccaggagtagagtggagagattaaactatagcttccagaatcacagacaaatctgagttcgaagaaaaggtgatcctttctcagtgagaattctcttgcttaatagtcagagagattttgggaaattctgagagtgatgcctataaagtgaaagaaaaggaggagactgagaaaaaggaaacagaaaagcaaagttattgatttttgagcaggtaaaaccgaaaaactcattctatcaattatctatctgtctgtctgtctgtctgtctatctatctatctatctatctatctatctatctatctatctatctatcatctattgtgaaaggaactgctcagggaaaacttgcctcccatttctattcaaagtcatccttctgctcactgcgatagatgcatatctgattgtctcctttggaaaggctaatcagaaactcaaaagaatgcagccttcatctcttgcttatctgtggcctggaacccccgtccctgctttgagtcttcctgcctttgcttcaagttgtctggcctttccagaccaaaccaatgtacttcttacatatattgattgatgtctcatgtctctctaaaatgtataaaactaagttgtgccccgaccaccttgggcacatgccgtcaggacttcctgtgactgtgtcatgggcacgtcctcaaccttggcaaaataaactctctaaattaactgagacctttctcaaattttgggggctcacactatctatctatctatctatctatctatctatctatctatctatctatcatctatctcctacctatcatttacccatccatcgtctaccagttatctatatatctatctcattatgctgccagaaattgtataatattgggaacctatctttaaggaacttaaaaagatgaaaaagaatcaggaaatgctgatacaaaagaaataaatagagaatgaggagcagtgctggatcctggctctggctttctgttaagagtgtctgtgccttcagaagtgctggagcaggaagggttcatggacgtggctgggtcataagtaaaagtctatgtccaaatggtggaaacttgggaggtctaaccagtcaagaattgtaagcagctgtaggaaacaatacaagtgaagaccgaataagagctaagtaaaaacttggaaaaagcccctgtaatcccagcactttgggaggctgaggcaggcagatcacaaggtcaagagattgagaccatcctggccattatgatgaaactctgtctctactaaaaatacaaaaattagctgggtgtggtggcgtgtgcctgtagtcccagctacttgggaggctgaagcaggacagtcgcttgaacctgggaggcggaggttgcagtgagctgagatcgcgccactgtactccagcctggtgactgagactccgtttcaaaacaaaaacaaaacaaaacaaacctggaaaaagaaaaaaaaaaaaacagaagagggaatcagaaagttaatgtctgatcatatagggaagaggccagaggagcagcagggaaatcaatctgggttgaatctggcagaaaatgcatacagagagagaactcagcatgggagtttcttgtattttcaaatgacttctaattcctggttactccatgcacagaggttgtactcctggagagcttaaaggtaacaaatagctttgatggaatgtggctgcaaagatattaaccttcctacagaagagagattagcagcagacatgtgcctattgtgtgtgtgtgtgtgtgtgtgtgtgtataaaatcagtatgttcaaataaactgtctgggttgctgctttggtttgtgctaattattttgttttcaaagttttaggaaagaactccatttatattgttttaaagaaaaaacaaagattgactgaggtaaacttggagtaagtataggcataatcaaatagggtcccctagatcaaagctcaagcctgctggtttatcaatgagatgtctttgctaaagagttgattttggatcaggggctatgttcatttaataaattacaagtgtgaaaaagtcacagagatactataaagtgatctgattatttaatttttggaatataaagatatgggggagacttgtctcttgtttattataacagagcctagaattgaataaataccaactagtgatggtaacgtgaaaatcttgatcactgcagagattaaaaaaaccaaatctcatagctttacccagaggcctaataagggctaaaataactaattaaaaaaatgaataaaagccaagccaaaccgcgagaggatgatctaagttaaaatacgtgaccaggcaggttgcttcagtcgtagtagaaatattttaataagctaggagcaagatgaatatggagtattaataattgtaattttctttcatagttaagatatcagaaaccagtgagatatctcatagcctgtaaaagcagagcctctaattttaagagccaatttattttactataatttgagatgctggaaagacttttgagattgttatttaaatgccgtttgctattaaactgtggttagaaaatctgctcagccaaaatgatgctgaaagagcattaagtttatgagtcacaaaagccagagtaattctaattactttcctgaacttcagtacaatagagatgtttaatatgcaatgggacactcctttaaaattgttgcaagacaggtgatmggagtcttggcttctctccccaccttgattatcagtgaagtaaaggttaggtgcggtattgtattgtgtgttttcatcttaaagtttcttcttctgcagaatgggttaatgatggaaacatttgggtattgtggtgcacagagtgggttctcgtgtctcttcagagcaaagtcctcttatacatcatcatgagcctcataatgacgtttcggtcaatgacaactgcatatatgatggtggtcccctaagattacaatggaacagaatgcatagctgaagaagagccaagagaaaaggaaattgcaggagaagaaaaagaagaaaattcacagtgaagggtttagcagaagcttttgcagacctcaacaagcttcttaaaaatttgaaaatatggactccaacaccaaaagattttcattaatagagagaaatcttcagggtgcattatctgctcccaggcagataatctatgatgaaaaaaagaaacaaactaagaaaccatgatgaacatattcctgaaaaaagtgacaccttctcaggaagagcctcaggcaggtctttcaggagtatccagaagaaggcttgttatcacaggagatggcagcaccatgtgtgttttaacccctggagaccgtccagcaggacaagatgtggaggcagaaggcagtgctgttgatgatcctgaccttgtatggggttaggctaatgtgtgtgtttgtgtcttagtttttaacaaaaacgtttaaaaagtaaaggaaaaaaaatcttaaaaacagaaaagagcttatagaataaggttataaagaaagaaaatatttttgcacagctgtacggygtgtttatgtgttattacaagagtaaaaaggtttagaaaatttaaaaattgataaagttgaaaagttacagtaaactgagtttaatttgttatttaagaaagaaaaatattttctataaatctagtctagcctaagggtatagtgtttataaagtatacagtagtgtacagtcaagtcctaggctttacattcactcaccactctgtcactgactcacccagagcaacttccagtcttgtaacctccattcatggtaagtggcctatacaagtgtactattttttatcttttactctgtatttttactgtaccttttctatgtttagttatgtttagattcacaaatatttcccattttgttgtaattgcctacagtattcagtacagtaacatgctgtaccagtttgtagcctaggagcaatagactctaccatatagcctacatctgcaataggctacactatctaggtttgtgtaagttcactctatgatgttcacccaatgaagaaatcacccgagacacatttctcagaacgtatccctgtcattaagtgaaacatgactgtagttaagtgaggttataatggtttagaatgggtcctaaatccaatgactgatgtctttttaataggccagtaaaaacagagagagacacagaggtccacataggaacaccatgtgaagatggtggaagagattgaaatgatgcatctacaagccaaggaatgccaagacttatggtagttgtattattattagaattattttttatgctattattataattggtagtgtttcatacagtatttattgacctgacattaatatttgaccagttttattttttttctttcactgaaaaacctaggtccattcttctttttttcaagcatcattttgtatgagtatgttttagttgcttctattgtatatttaagacttgactccccaagaaataggaacacttttacaccgttggtaggagtgtaaattagttcaaccattggggaagacagtgtggtgattcttcaaggatctagaaccagaaataccatttgacccagcaatcccattactgggtatatgcccagaggattataaattctataaagacacatgcacatgtatgtttattgcagcactattcacaataacaaagacttggaaccaacccaaatgcccatcaatgatagactggttaaagaaaatgtggcacatatataccatggaatactatgtagccataaaaaagaatgagttcatatcctttgcagggacatagatgaagctggaagccatcattctcagcaaactaacacaggaacagaaaaccaaacactgcactttctcactcataagtgggaggtgaacaataagaacacatggacacacggaggggaatatcacacacaggggcctgtcggggggtggagagaaaggggaagggcattaggacaaaaacctaatacacacagggcttaaaacctagacgatggtttgataggtgcagcaaaccaccatggcacatgtatacctatgttacaaacctgcacattctgcacatgtttcccagaacttaaagtaaaataataaaaaaagacctgactccccattcccccaattttgtaatcaaataagagagtatttacctctttattgggaaatatatataatgcccatttttctaatatcaaagttgcagcttaaatatatatatgtaatacatatatttatattagaaatatagttgtactttacacacacacacacacacacacacacatacacacacacacatatattggagataagagtcttgatcaggctggactcaagcactcccgcactcaagttatcctcctgcctcagcctcctgagtagctgggactataggtgtgaaccactgcaccctgcttatagctgataatttaatatgaatttatcttagctaatctgcaaagaccctattgccaaataaggtcacattctgaggtttgggatagacataaattttttatatttgctatagttagtgttctttttttaatttatattaaataaatgcttctgttttgaagcatttatattattaaatgaatattatttatttattttttataaaataaatttatatattaaataaatgcttccttaaagtttctatatttcctgtctggcttccttgttgttatattgctaaacttgtttgggaaacatattttgtttccattccatgggtggttactcaaaagttttttcaactatgtttaacgtgatgttccaagggtttttttggggagtgtttccccttgacataagaagtttaggatacttttatttttacttctccagtaccacaacattcactcccttctctgaattctgtcttttacactgatactgttttgtaatttagatactgataattttactaacaatattatttttatattatatatcttctctttggggacatattttgctttgcattcaattttatatcaagacattaaaatttttcttagctttaatatgtatttttaactgatcttaaaggattctgttaattctgttctctcaatcagttggagtatatctttgagtaatttccttaaagagaagtatgtttcctgagctgttgcacagctgacttttttttttcttttttactttgaacttgaataatagcttgaattttgctccatttggttctggtgttttgtgttttgtttttatttttttagagacagagtctttctgtgttgcccaggctggagtacagtggcatgatcatagctcactgtaaccttgaactcccagactcaagtgtccctcctgcctcagcctatggaatacatccagctaattaattttgcttttgtagaggtagggtctcactatgttttccaggctggtcttgaactccaggcctcaagtaatcttcacgtttccgcttcccaaagtgatggttagaggtagctaaataaagaattctatcactgtcattattactattcaaaaatattacgacaatgtcattaggtataacatttcttcttattgatttttcttgggatagaaatcttttttgatttatatatactggatttctgtaaatttagattttcttctaatgattcacttattatatttcttgctggcttcttcagaaacaaatattatccatatgatgtctcctttttcttcatcttctatattgtccatattttctccaattattttaatctgtttatacctttattctatgctgacatatcttcttgagtttcacttttacagttttgatttgaatttcttctccatctatttttttccattaccctccatatcgattaagttacattaaattaagaaattatttctcttacgtttttcttgggttccttgtttttatgtttttcatatctcaactaatctttcttattgcttataaaaatcttgttctattatcaccttattcatgaaaaaactcaaaattctgttttctttagataatagcatatagtttcctaaaattcccttctgaaaacttttagagatctactttttggaagcaactctatttaacttaccccattatatttcttatttgttataattttatatttttccagtcaaagattggcaaaatatatttttgacaagcaaagattctctatacttatttttcattagaatgggtgtgtgtgtggcccttggtcacattctgtctattgatgtgatcttggaatttgtactttaaatccataattgaaaggctagttggtttgtgttgttcccagtttaattctcatttgtaagcaaatatcctcctagtgctcctttgttctagtgcagttttatcttctgagtgctggaaaacctctacttcttgagaagtatgtgttgttactaggatgttgttttttccctctgcatatattgctgtcttcttaatggaaagtacacctctctgaaaactctattctctattttctgcccatttgttctctggacttcatagaaccttcttctatgtggaaagatagtgggaaaaaaaatcatgcagtggtttgtatgaaaaactacaccttttgcctaacagcaatatctaagatgtggagagaaataattaacctgttttctggctagtacaggtgttggatccttgagtatggggacacatttacattttttgtgcatctgtttctatttcatgtaatgatactgtgtgaagtcaggaatagaattctaagtaggattttcctcaatttaacttctactgtcttataattaatttccatttatcctgcattttggctttgaattatctgtcagtgttagatttcagagtttttgagagcttcttttttttttttcctcttgggtacgcctttgtaagtatttaaaggttagttggaaagaatggtttggagaatgctacccagacactcttttggattttaagtctctctactgattcaaaatgctatttcagtaatctcagttgtaaatgtttactatttatttagagacaaggtcttgctctgtcattcaggctggagtgcaatgatgtgatcatagctcactgcagccttgaacttctaggatcaggtgatcctcctgcctcagcctcctgagtagctaggactacaggtgtgcaccactgagtgtggctaattttgtttattttttgtagagatggggtctctgtcacccagatgggtgtacaatggcacaatcatagctcactgcagctttaaactcccaggctcaagctaccctcctactctggcctcctttgtagctgttactatcgtgcacaccaccatgcacagctaagtttttctatttttttgtacagacaggctttcaccatgttgcccaagttgatctcaaaatcctaggctcaagcgatcctcttgccttggcctcccaaagtgctgggattataggcatgagccatggtgcctgtcttattcttttactgttgaggaaaatatcttcaaaaagctcatttaagaatgaaacatagtgtgagaattcatttttgagttgtagcatgtctaagaaggtatagaatttttggatagcatatttttttccggcagagttctagaaatgttactcctgtgtcttctagtgttttgtattaaggaaaacaaatgcatggccaggctgattattaatcttttgtgaagagtctaatatttttcatgttgatttttattcctttgtgaagaataaatatttttaagagtatttgtgggattctttcatctctgaaatttgatatttctatctgattaagctgtgtaagtctagttgtctagtttcttttcatgaggtttttcctaagcatcaaaaaatacgttcaaaattttatgctagtataaatttcagattgggaataatttttttgttatttctctgattattgattattttgttttctgatgcatactcttataggagataacatcttctagaattattcttcatgtatcttatcttctacctccttttgttcatgtctttatcttcttctgctaattctgggataatttgttgagtttatcttctccagcactcattcatttcctgcatatctttcttactgccatcatccagttagtttggcattatgttttttgacctcactsggacctttctaatttaagtcttcctttgtgaatatttcccagctacagagatgccatggcttcttgaacccttctggaagagaatctaatattttctaaaaatttcttctgaattttggagtaaccctattttaaaaggagatattccatcattttttaaaacaatgactcacttattttggacaccactattttctcatatactttggatttgctatttttaagagaaggaggctcaatgctgatattaatcaagtaggaattgaggtaggctaatgtttgtgtgtgtacttttcactcatttttagaaggacccttagcttcagagtccccagagtcttgaatgaggtgagaagtggaaattcagaaggttggaatgccctatatagtcatcacataaagttttaacaataccgcacatttatagatgaattactcaggaaattcattctcctctctatactgcctcatatatttctactccatgtcctcttctgcttatcttgactcccattccagagggaaatctcaggcagagtttctaatttttaaatttctgcctgctttggggctgccaatttcaggaaggtatcgctgagtctttcagtattgccagtggaatcgaactccagaaaaactcaaaggacaccacatggctatctccccagtgtccaatagcctgttcccaatgccattcccaactcttctaaattcatctggggcttaatagactctccccatcccaactcttctaaattcatctggggcttaatagactttccccctcatagacttccatgataagctgctctgtttcacaatagggaagcttacacaggcctttccttcaatctcatcctgccctccctagctaacagaaattyctagaaatatctagccagtgagagcatccatttctagtttcatcctataatgttggttttcataatgttggttttaaatgtaattattcattacaaagtatttgtgagggagtagagaagaatgggtacttataataaaagcatgactttttaatgtatcaaaactatacagaaacaaagacaacatagagataactcttgaagaagacagaacatcaacatcataagccccatttccttattttgaagtgtgggtcttctattcaatttctacaatagatttcaaatgtaatatttgataatgaaggtgatgataacaatgatattgatgataagagatgatactgatgagcacacttaagtgcttaatttatgataataatcattgttaacattcattagccttattgtatatcaggcactgtgctggcttctttacacacatgatcccagtgaatctctgtaacaggcctataagagagacacataaatttatcctcaccttatatatgaggaaaccaaggaacagactagttaagtaaggtaccagaggtcacacagatagtaactgacagaactgagacttgaatccagatcagtctggctacagagcccatgttcttatctactgtctgattaaaaataatatgacacatgacaggtacaagttacatgagaattcctttgacatgtgaatgaatggttctttgaagacagagtgcagtaaattccagtctataaaagagttttttgaataatatgatgaccaaacttgtgtgtccagggcaaaaggagggtacaaatagacagaatatgcaagatagagwaatgctggagttaagtctcagatatctttgaagcaagagtttcatccttaatttgcttggtgggcatgtgtttcttacatataagatttttatgtttctgaagcccagaggataagatggagaattcagctcagggttggcctaagggagggaggtgaactagcgagaaagaaaaaggtcccataagacaccccaggaagaaccagactactgaggaagattcagactgttgaatattatgttaatgaagacaactgagtcactctatgcctagtgtttatttcttttgtacttaaagattccagtgttttctagtaaaaataacatgtctgtactaaagggacaggttggcaggagaaatcattaatgggagatggaggatggccctggactatgtgtgtgtgtctctgtcaagtcgtggtgggaacccaggggaaaggctttatgtttgtgcagattttttattttgactcattctatgtattaagaaatatggagaagactacaggcatattttatcttataggttaaaaacaatgtaaatgaccttagaatgacttttgtgtgaggagcactttaaaaaaaaatagaaatctttagtatccttgaacccctaatgtgattaggtctaattgtgctatcagtataaatatgaacaatcatggcattagaagctgtaattgcctaattatgacttgcactaatgtgatgatttttgttagatctgaatcctaactaataggactagtctgccaaatctgaagtcagaaataaaagtcaaatcaagtattattttgtgtccctgggtaaattcaccagtacaatttctccatgagctagagaccctggacttctggcttttctctgctatatatcttataccatcccactcaggatgtgggcacctgatcattcaatttaagtcattcgtggatgactactaaaggaaaatggcagtaaaggtattgaattagtgtggatttttattagcacaatattttattattctttaaaattttcctaagagctgattaacataaactctttgcagattgaaatcaatcctctcatcaggtaaccaacataaaaataatcagggcattcctgagggatcacatataaaactgacagaggcaatgaagtgtcctgcccactttccagcatgttccttatgatcacactgccttcctccgtacctgttttatctcacctgccaatgtttatttgtttcctggaggaaagtcttacaaagcacactccctaaatattatttgaaagtccagatgtacaggaacatttatttctcagcgagtgagttgtccactagtgcaagaagcagaggcaatagttcatctctctctgtctttggaaaatttggtgactagcagttaacactcatagagagaaaacaatgatgtatagaaagtccagcgtggaagactatattttctccactttcctggtctatttgtgatattttagttgcttcaacaatgactgaaataagactggttatacacaaggctgactgcttggaagcattctttgttcctgggttttaggtgtgtgagtgtgatagaagactcctcagagatcctccataataaaaccatctagatgacaaacagaatgatctgtacaacaaattctgaattataatgggtaaaatgaaagcaaactccagagtatttctttttgtgtcctacagcattagatattttgtctggtagccacatacgcaagacccaatctcgtttcagtctaataaattacataaagctatttttgcagtcaattagcatgctgaatgtttcaacttccacatgcgcattctctttcttttctacagtttgtaaactgctggagaggtgtgttaacattctatttcaatgtcacagtgagaggaagtggtgataatagaaggcaggggcaggacatgttgctttctcgatacttttttttctgtttttcttttttcttttttttaaagaggtgggacctctaaacagatgagtgttagctctaagtaaaatatagttctaagcatcacaattctgtgcttatattttaataggtagttggtgtttcctagggcggctataaaggtatcacaagctgagtggcttaaaacaacataaatttattttcttccagttctagaggttagaaatctgaaatcaaggtgttggtagggccatactctatctgaaggctctagggaaattcctccattgcctctttctagtttctggtggttgcaggctgtagctgatgttctttggcttatagatgcctcgctccaatttctgcctccatcttcatgtggtcatcttcctagtgtctctgtgtccaaattttcctcttcttagaagcacacccaatattggaattgagttcaccctaattcattatgacctcatcttaactttgttacattttcaatgactatttctaaataaggtcacattctgagatactgggggttagaactttcatgtcttttgggggaacaaaattaaatctgtaacaaatgacaaaatggaaagtttcattcttgcatttgctcagagaagggtccctaagggaatagttacccatcagatttagcaactttttcctagaagcctcatgagaggggtcaggatgaatgcacctgttctgcatataaggtaggcagccaccctccaatatcatcaaattcaacactttatagttaaaaaaaattagcccagaatcttaaataagctacaaagtttacaaacaactaatgatgaagaggctgagagtggattccactgttgcttgatttctggcctggagttcttccttcctgctcacactgtgggggcatgttgaggtgcacaatgcttctgtggttacccagtaggacagtgacagcttgggatgcctcctgtcacactgtgaatcttgtgaagttacttttaggccaccttgtgactagccacttcaaagtctttaaaagacaggaggtataaatgaaatgaataaaacaagagcttaagctattatctctcctctggggcatttgcattttaatggagcagcctgggctctgtcccagacctattgattcataatctccaagggagagtcctgggagaatctgtattttagagagcataccaggtgactcagatagttgggcatgtttaggaaacactggcacagagaaattctgacttctgaaatagtaagaaagaaatatttactggaaggattttaggtaagagccaggtggggatggtgggggaggaagggaagctactacttgatggcctccaaaaaacacgagtcagatgcataattctgtattctttgcccaaagtctgaggcctggtttctgccccaggaggaattcagaggaagcaggttttctgggcttggagtgtagtatccctcttaggagaagcaagagagatttaggattgcttatttattgcagaacccacgtcttcttgcagattgcaaagccaattctgaaactgcctttgcaaaaattaaaacagtgaggaaactatgacagtgaggagatctgtctaactaactcccatcttgccttttaaccttccaactgcccttcatcactcctgggctcaggccacgctaacttcgaaagacatttattttgtagtttaaatgataatagcccttctcccaaactaaaccaccttggtacagctgataaaagacaaccaggttaggaggatgagcaatctgaattctgctcaggtgttgacctaaaggattacccaccatgattccagaagtcacaagatttgcaaatcccccaattattgctgcagataacatctctggaactaagattggccttttgagatgttttttcaggtgtttgcatttctgatgaccaatagcttcacctggacctccccacgccctctgaccagtcctgtggccccacccagaagcggactccctggcccaccaaactattattgaaaaaccatagcctccgaattttctgggagatcggtttgagttattactctgtctcccacatggtgtggctggccttgtgtcaattaaactccttcttcattgcaatgctgtggtctcctgagttggttttgtctatgcagtgcaggaagaatctgttggctggttacaattttatattaagggagggtacccaagagaaaattctagcccatttctattgcttcatttttcacattgcatgcagtcagtggtgatgtactttctctctctctttttttagagagagagttcctttttttttttttttagagagttcctcattacttgttttgaacctaaasttataatttagtgtctgtgacagcacatttgattgtttttaaatgaaggtgataggaaaggcagaagaatgactagggaagaaaatctggagaacagatgacaagataacattgcttttgattctctgcaaacaagcatggtattgaaaaatgatccaaaatcgtttgcttgagcaccacagttacttttgagtaatatttttgtgagatacttttaaatttatttttttgaagtctggtgctctgaaattgaatttgaagtcagcttaataccaaagtgtgacacattctctttcagcaggctttactgtatctcacgtctatttagtttttacaaatttagttttcatgatttctgcatctttggaatacaaatcctgggatggtttctatctgaatggagtcttcagtgaatggtgacatggtttcctttattttttcctatttcttttttttttgagacagagtctcgctctgtcgcccaggctggagtgcagtggtgcgatcccggctcactacaagctccacctcccgggttcatgccattctcctgcctcagcctcccgagtagctgggactacaggcgcccgccaccacgcctggctaattttttttttttttttgtatttttagtagagatggggtttcaccgtgttagccaggatggtctcgatctcctgacctcgtgatctgccctccttggcctcccaaagtgctttatatcttctgtcttgattaattttcttcctctttggtaacacctgttgtctcttacggaccaaccctgtgctagggctgaggcacaaggagctctaagaaccaagctgtggccgggcacggtggctcaagcctgtaatcccagcactttgggaggccaaggctgtcggatcatgaggtcaggagattgagaccatcctggctaacacggtgaaaccccgtctctactaaaaatacaaaaattagccgggcatggtggtgggcgcctgtagtcccagctactctggaggctgagacaggagaatggtgcgaacccgggaggtggagcttgcagtgagccgagatcgcgccactgcactccagcctgggcgacagagcgagactcactctcmaaaaaaaaaaaaaaaaaaaaaaaaaaaggaaccaagttgtgagtgagaaggacctggaaaggcactgttagtggcagtggatccgtaggggtctgcaggaacctcaactcttgcgtcctcagaagaattcgacggaggaggcatgaggcagaaggagagacagaggcaagttttatagcagaagtgaaagtttatttaaaagctttagagagcaggaatgaaagaaaggaaagtacacttggaagagggccaagcaggtgacttgagagaccaagtgcgctgtttgaccttgacttacggtttagtatattggcatacttctggggtcttgtgtccctgatttcctgatttttccctggagggtgcgccgtctgtatgcgcagtggcctactagcgtttgggagaggccgtaggcgcagtgtgtttactggagttgtacgcrtgctccctagagtggttcttcccttcccggtctagcattcctaggggaaagtgatgtaccagttaagctctgctgttttgcctcttagtgctcatgcttgagcccactcgcccaattcctgaaatcttagggggaagcggctgatcaccagtttcagatttttcctatgtattgtgagactgcctttccctggcacaggctgcaactaattattattttagagacacagtaaacaaccacttgatcatcacctgatggtcagctggtgtgtgtatgggggggttgggagggccctctcctgccctgctcatgtgtgattagctacccagtttaacaggaccatgttattgcatcattaaaagtgaagtattatgccctatgtcaggagggtagaggtgcacagataaggtcagtggaccccagttaagggggcagggaatacttcctggaataaattacatttgagctgaaacttgaaggatgtatttaggtgatgtagacaagtggttggagcagagatctcatctgtacccacatactccaccttccctcttgctgcaattgattatctactcccatgtaagacaagcccttgacttatacactacctctcatcctctgatattttcaagtagctcattctgcagttggctcttcatcctgcagtggcaatttttactatttacatggtcttttgcataaacatgcaatattttctttctttgaaagcaaaacaaaactcccttaatccacattcacctccagtatatgtctcatttttctgttactctacagccaaattccttgaaattgttacttatattcacatctccatttctttgcattgcgtacttcctgaagctcattgcaattatagtttcatccttgccatttcactgaaatcactcttgtcaaggtcacccactgcctcccataatgccagagtggtcaatttttagtatccttactgtgcaaccagctctcatgattgtacccagtcaaatctctataataaattatacatctctctacagacctggactgaaacattgctatttggtgttttaccctatttagagccaaaatatattttcataagaagaaactcacagctgtcacatgtawgtaagttataaactgatttcagaatctccaatacagaaaatagtaactttagtgttcctattgtttggtactctaataataattagagaaaactgagagtttgggattatgtgactacaggaaatacctgtaattgccaattggcttcataataagaaaattggcagggctaagaaggcccagggaattaagaatataaatgtagaggttaacatggagaactacttagcatgaaagaatatggatgtttcatttaatttttttcatatcaaaaatctctcttcttgtaccaatttctgctcattggcttatagcaggtacagttcagggactctagcattgattagtataagttcctaattttcaggtgaaggcactgaggcccaggagagtgaagggcttgaggtcaaacacccatgaatggagaaggcttctggccccctccaatcccctctgcatctcactaacaggactggaagctgctgaaacagaggtattggaagcccacagatcatcaatatacagtttgaacttgtagtgaggtagacaagaataattcatagggatgtattatagagtaggtagagaaggctgactcctgacagtggcatatttgataaaaatccycccaaaggcatttagtacctggtaggctaatggctcatgagagaaaacacaagaaaggagatgatatgggagggtgggaaagccaatctttaggtaaaaaattacaagtcgtctttaaactatttactttaaaaattactagtttttctgctctgcatgctaatatgctactctttttttctcaactttattatttctctttgaatgtatattagtccattcttacattgctataaagaaatatcggagactaggtaatttataaagaaaagaggtttaattgcctcatggtttcatagrctgtttgggtagcatggctggggaggcctcaggaaacttttaatcatggtggaaagtgaaggggaagtagggacgtcttacatgaccagagcaggaggaagagagagaagggggagatggtgcacacttttttttttttaagctttgtatctaatttggcaatcttattccagtatttttctttttctttttttttttattatactttaagttctagggtacatatgcacaatgtgcaggtttgttacatatgtatacatgtgccatgttggtgtgctgcacctattacctcgtcatttacattaggtatatctcctaatgctttccctcccccctcccccaccccatgacaggccctggtgtgtgatgttccccttcctgtgtccaagtgttctcattgttcaattcccacctatgagtgagaacatgcggtgtttgtttttttttgtccttgtgatagttttctgagaatgatggtttccagcttcatccatgtccttacaaaggacatgaactcatccatttttatggctgcatagtattccatggtgtatatgtgccacattttcttaatccagtctatcattgatggacatttgggttggttccaagtcttcgctattgtgaatagtgccgcaataaacatacgtgtgcatgtgtctttatagcagcatgacttctaatcctttgggtatatacccagtaatgggatggctgggtcaaatgatatttctagttctagatccctgaggaatcgccacactgtcttctacaatggttgaactagtttacygtctcaccaacagtgtaaaagtgttcctatttctctacatcatctccagcacctgttgtttcctgactttttaatgatygccattctaactggtgtgagatggtatctsattgtggttttgatttgcatttctcggatggccagtgatgatgagcattttttcatgtgtctgttggctgcataaatgtcttcttttgagaagtgtctgttcatatccttcgyccactttttgatggggttgtttgtttttttcttgtaaatttgtttgagttctttgtagattttggatattagccctttgtcagataagtagattgcaaaaattttctcccattctgtaggttgtctgttcactctgatggtagtttcttttgccgtgcagaagccctttagtttaattagatctcatttgtcaattttggcttttgttgccattgcttttggtgttttagacatgaagtccttgaccatgcctrtgtcctgaatggtattgcctaggttttctcctagggtttttatggttttaggtctaacatgtaagtctttaatccatcttgaattaatttttgtgtaaggtataaggaagggatccagtttcagctttctacatatggctagccagttttcccagcaccatttgttaaatagggaattgtttccccatttcttgtttttgtcaggattgtcaaagatcagatggttgtagatgtgtggtattatttctgagggctctgttctgttccattggtgtatatctctgttttgktaccastacyatgctgttttggttactgtagccttgtagtatagtttgaagtcaggtagtgtgatgcctccagctttgttcttttggcttaggattgtcttggcaatgtgagctcttttcagattccatatgaactttaaagtagttttttccaattctgtgaagcaagtcattggtagyttgatggggatgtcattgaatctataaattaccttgggcagtaaggccattttcatgatattgattcttcctacccatgagcatggaattttcttccattcgtttgtatcctcttttatttcattgagcagtggtttgtagttcttgaagaggtccttcacatcccttgtaaattggattcctaggtattttattctctttgaagcaattgtgaatgggagttcactcatgatttggctctctgtttgtctgttattggtgtgtaagaatgcttgtgatttttgcacattgattttgtatcctgagactttgctgaagttgcttatcaactgaaggagattttgggctgagacaatggggttttctaaatatacaatcatgtcatctgcaaacagggacaatttgacttcctcttttcctaactgaataacctttatttctttctcctgcctgttattatgttgaataggagtggtgagggagggcatccctgtgttgtgccagttttcaaagggaatgctttgagtttttgtccattcagtatgatattggctgtgggtttgtcataratagctcttgtttttttgagatacaccccatcaatacctaatttattgaragtttttagcatgaagggctgttgaattttgtcaaagggcttttcttcatctattgagataatcatgtggtttttgtctttggttctgtttgtatgctggattacatttattgatttgcatatgttgaaccatcctcgcatcccaaggatgaagcccaggtgatcatggtggataagctttttgatgtgctgctggattaggtttgccagtattttattgaggatttttgcacaaatgttcatctgggatgttggtctaaaattctctttttttgttgtgtctctgccaggctttggtatcaggataatgctggcctcatgaaatgagttagggaggattctctctttttctattgattggaatagtttcagaaggaagggtaccagctcctccttgtacctctggtagaattcggctgtgaatccatctggtcctggacttcttttggttggtaggctattaattattgccttaatttcagagcctgttattgatctattcagggattcaacttcttcctggtttagttttgggagggtgtatgtgtccaggaatttttccatttcttctagattttctagtttatttacatagaagtgtttatagtattctctgatggtagtttgtatttctgygggattggtggtgatatcccctttatcattttttattgagtccatttgattcttctctcttttcttctttattattcttgctagctgtctatcaattttgttgatcttttcaaaaaaccagctgctggattcattgattttttgaagggttttttttgtatctgtatttccttcagttcttctctgatcttagttatttcttgccgtctgctagcttttgaatgtgtgttctcttgcttctctagttcttttaattgtgatgttasggtgtcaattttagatctttcctgctttctcttgtgggcatttagtgttataaatttccctctacactgctttaaatgtgtcccatttaaaggtgatttggggtggagagttctttagatgtctattaggtccacttggtgcagagctgagttcaactcctggatatccttgttaactttctgtctcgttgatctgtctaatgttgacagtggggtgttaaattctctcattattattgtgtgggagtctaagtctctttgtaggtctctaaggacttgctttatrtatctgggtgctcctgtattgggtgcatatatatttaagatagttagctcttcttgttgaattgatccctttaccattatgtaatgaccttctttgtctcttttgatctttattggtttaaagtctgttttatcagagactaggattgcaacccctgcctttttttgttttccatttgcttggttgatcttcctccatccctttattttgagtctatgtgtgtctctgcatgtgagctgggtctcctgaatacagcacactgatgggtcttgactctttatccaatttgccagtctgtgtcttataattggtacatttatcccatttacatttaaggttaatattgttatgtgtgaatttgattctgtcattatgatgttagctggctattttgcttgttagttaatgcagtttcttcctagcatcagtggtctttacaatttgtcatgtttttgcagtcgctggtaccagttgttcctttccatgtttagtgcttccttcaggagctcttttagggcaggcctggtggtgacaaaatctctcagcatttgcttctctgtaaagaattctgtttctccttcacttatgaagcttagtttggctggatatgaaattctggkttgaaaattcttttctttaagaatgttgaatattggccccactctcttctggcttctagagtttctgccaagagatctactgttagtctgaagggtttccctttgtgggcaacccgacctttctctctggctgcccttaacattttttccttcatttcaactttggtgaatctgacaattacgtttcttggagttgctcttctcaaggagtatctttgtggcgttctctgtatttcctgaatttgaatgttggcctgccttgctagkttggggaagttctcctggataataccctgcagagtgttttccaacttggttccattctccccatcactttcaggtacaccaatcagatgtagatttggtcttttcacatagtcccatatttcttgaaggctttgtttgtttctttttactcttttttctctagacttctcttctcacttcatttcattcatttgatcctcagtcactgatatcctttgttccagttgatcgaatcagctactgaagcttgtgcattcattacatagttctcatgccatgtttttcagctccatcacgtcatttaaggactcctctacattggttattctagttagccattcgtctaatcttttttcaaggtttttagctttttttgcaatgcgttctaacttcctcctttagcttggagaagtttgatcttytgaagccttcttctttcaactcgtcaaagtcattctccatccagctttgttccattgctggtgaggaactgtgttcctttggagagggagaggcgctctgatttttagaattttcagcgtttctgctctgttttttccccatctttgtggttttatctacctttggtctttgatgatggtgacgtacagatggggttttggtgtggatgtcctttctgtttcttagttttccttctaacagttagggtcctcagctgcaggtctgttggagtttactggaggtccactccagaccctgtttgcctggatatcagcagtggaggctgcagaacagtgaatattgctgaacagcaaatgttgctgcttgattgttcctytggaagcttcatctcagaggggtacctggctgtgtgaggtgtcagtctgcccctactggggagtgtctcccagttaggctactcagggttcagggacccacttgaggaggcagtctgtctgttctcagatctcaaactccattctgggagaaccactactctcttcaaagctgtcagacagggacatttaagtctgcagaggtttctgctgccttttgtttggctgtgccctgcccccagaggtggcatctacagaggcaggcaggcctccttgagctgcrgtgagctccacccagttcgagcttcctggctgctttgtttacctgctcaagcctcagcaatggtgggcgccccacccccagcctcactgyagccttgcagtttgatctcagactgctgtgctagcaatgaagggggctccgtgggcatgggaccctctgagccatgtgtgggatataatctcctggtgtgccgtttgctaagaccgttggaaaagggcaatattagtgagaggtgacagcatgctggcagccctcacagccctcgctygctctcagcacctcctctgcckgggctcccactttggcagcacttgaggagcccttcagcccaccgctgcactgtgggagcccctttctgggctggccaaggctggagccggctccctcagcttgcagggaggtgtggaaggagaggtgcgagcggcaaccagggctgcacagggtgcttacgggccagctggagttctgggtgggcatgggcttggtgggccctgccagagggccctctcagagtggccacctggccctgccagccctggggaatgaggagcttagcacccggaccagcggctgcgcagggtgtgctgggtcccccagcagtgccagcccaccagtgctgtgctcgatttctctccaggccttagctgccttcctgtggggcagggctcgggacctgcagcccgccatgcytgagtcccgcccccacccccacgggstcctgtgcagcctgagcctccccgacgagcgctgcccactgctccatggtgcccagtcccatcgaccacccaagggctgaggagtgtgggcgcacagcacaggactggcaggcagctccaccagcagccccagtgcgagatccactgggtgaggccagctgggctcctgtgtctagtgggaacttggaraacctttatgtctagctaagggattgtaaatacaccaatcagcactctgtctctagctcaaggtttgtaaacacaccaatcagcaccctgtgtctagctcaggttttgtgaatacaccaatcgacactctgtgtctagctactctggtggggacttggaaaacttttatgtctagctaagagattgtaaataacaccaatcgacactctgtatctagctactctggtggggacttggagaacctttgtgtccagctcagggattttaaacacaccaatcagcaccctgtcaaaacagaccactcggctctctgtaaaatggaccaatcagcaggatgtgggtggggccagataagagaataaaagcaggctgcccgagccagcagtggcaaccrgctggggtccccttccacactgtggaarctttgttctttcgctctttgaaataaatcttgctgctgctcaatctttgggtacacactgcctttatgagctgtaacactcactgtgaaggtctgcagcttcactcctgaagccagcaagaccatgaacccaccgggaggaatgaacaactccagacgcgccaccttaagacccgtaacactcaccgcaaaggtctgcagcttcactcctgagccaaagagaccacgaacccaccagaaggaagaaactctgaacacatccgaacatcagaaggaacagactccagacgatccaccttaagagctgtaacactcaccgtgaaggtccgcggcttcattcttgaagtcagtgagactaagaacccaccaattccggacacattagggtgtgagtgacccgattttccaggtgctgtctgtcacccttttccttggctaggaaagggaattccctgaccccttgtgcttcccgggtgaggcaatgcctcgccctgctttggctcacacttggtgtgctgcacccactgttctgcccccactgactgacgagccccagtgagatgaacccagcaccttagttggaaatgcagaaatcaycygtcttctgcgttgctcacactgggagctgtagactggagctgtttytatttggccatcttggaaccaccttcccaatagtacacatttttaaacaaccagatctcatgagaactcactcactatcatgagaacagcaagggggaaatcagcccccatgatctagtcacctcccaacaggtccctcctccaacattggggattataatttgacatgaaatattggtggggacacaaatccaaaccatattagaatatatgcacaggaaatggcctaaagatgtcatatgcccttggttttacttagagtttgaaaatcaggttatgaggtcacttatttcagacagtagttcacattatttaactatcctctgtcacttttagagtttttattttattaaaggctttaattggtaatactcatttctttttcttttattagcattgattttactttctgtagaaatacagaaagcattttcaaatgctaattttattatgtctgtatctggtagaagattcaaaacattgctccaaaaacacttggcagcaaattccccattcactggcaacctgaaatrtaagtttattgagcatgaatgataattcgttatcagatgtaagtcttggctctaattacaagatgcttgtagtccaacatgtagtctaacaccttatactctgatcaagtataagaaagaggccaatttactagtagaaattgcaacaatgaataggaaaaaaaatgtacgctgcaaagcagagcactgtgagagaagaatgtatggtatattcatagtggttgagggggagaggattaatagcttttggacatattacagaatgttaattacatgcaaaacaaaatagttctgtatagggaagtgtgaatgctgtacatagcatgtgactagcttgcatttaatggggaaaagaatttaactagataattagtatatatcaaatgcaatttatgtgtcagacatcatgctatttatgtattttacacaattattatcaaaatgtaatacattaccaatgactagaaataatagttgaagaataakaatagtttcataaaaagtgtaggataattgaatcagagagagacattcagagaagaaaaacgttatgaaaaattttaagtagtagtttgaaggaagaaaaaagagttttccaaaaagaaaatgtctggaaatataaagyaattcaaaatttgagaagcagaggttttgctttagtaaggagagggtaaatagatatggctggtagagtgtaractgtgaccagagcagcgattctcttggcttataagaggaaactgctgggtaatcccaaagggccttgaattgttgatgaaatgtaagttctttgtggagttaattttggtcaaacattgaccaaaatgtttataaatttccttttttcgtggtaaaataaaattgtcttatgattgcttcttgagtgaatttttaaggatattaaaagttggtattccttaaaagttaaccttttacggttaataaactattgctatagtttattatggtctttgattcatttttctactaggttacttgagactgctacacaacatcaaaaaaattctaatgcacatgggcacaggtttattgtttgaattcccataaaaatttaaaacatsactgaaatggcaaagttgatttaacattaaatgtaacatatcacattaaaaatagaagatactaaagaaaaaatatacaaatattgtagtagatggaggaaaacttctctatgcattratgataaaaattatcaggaagttcagagtagaaggaaaagttttcaacctgaaaaaccatttttactaaaagcctacagcaaacatcatgcttgaagattaaatagtagaaacactccttttaaaatgaaacatgacagacatgcatatgtttttattttttgcttttttctctctttttcttgctctcccagtcttcctcttttttcttttttagtattatattggaggtctcagaatgctcaggaagacaagaaaacaaaaatatattggaatatgagcggaagactttttttgtcattacttataattgataaaattaacttcacagaaagtcctctacaacatacaggaaaactatttgaattagtatgaaagcttagtgacagtattggatatacaaaatataaatctcaattgcaaatctatacacaaggatgaaagattaggaaatatattttaaaatatattatttacaagagcagtaaaatatattaaggtcctagtaataaatcaaataaagatgtgcaagacctcaaagaagaaaatccagaaaactttattcaacaatgttaaagaagagagacagatcatagggagacacaatagcataaaggtccaaattctttccaaattgatatatagtctaatgcaatttaataaaaatcccaaacactaatttttatgagattagacaagctgattctaatatatacatggaagaacaaacggccaagaatagccaacatatgcttaaagaaacaaaatcaaggggcttataataatgctgctataattaagartggatgattatgtagatcaatggaatagaacagaaagttcagaaattgacatgttaatttagggaaattaaatattttgaaaaggtagcattgaatattagtgagcaaataattcttttattaagtcacctggtacaatgattatttatatagaaaatttataattggatctctacttcacatcatatatgaaattcaattccaggcagatttaggatttagatgtgaaaaacaaaactttaaaatatttagagaataaatgtttaagaatattttacagggtaggggaaaatttcttaagcaatcacatgtagcataatgtcaaaatggaaaggctgataaattagatttaaacaatctaattttaaattagatttaaacagtctaattttaaattagatttaaacagtctaattttaaattagatttaaacagtctaattttaaattagatttaaacagactaattttaaattagatttaaacagtctaattttaaattagatttaaacagtctaattttaaattagatttaaacagtctaattttaaattagatttaaacagtctaattttaaattagatttaaaaaattaaggccttttcttcgttcaaagatactttaaattttgtaaaaaataagcatcaaattgaaagaaatttgcaatacttttaaccaacaaaggattaatgttcagaatgtatgcataactcctatgtttcatataggagttagaaaaaaacgaagagcatacggaggatatggcagaaattttaggttttttaaaaattagatgttgtttggactgtatatacatttttttgttcctttataaaaaagtaacagctttgagatataattcatataccatcatacatttcctttaaaatgtataatttaatggtttttagtatatttacaattatgtaactgatagactctttgtgttccttagctcagctaggtctgagttcttgtcaaatgaccaggaagaattaggcacgtggacaccagagagtgagtggagtarrattaattaagcgaaatgaaaactctcagtggagagtgtatgtggggaagggggtggttcccctacctgaaggtgggaaggccccccaacctgccgccccatgtggctgggtctggggtcttttatggactcagaatggagagtgcatgctgattggtttgtgagtatgcaaaaaaggttaaaacaaagacaccactcagacgtgggcatgagagtgtagaagaccaattaggaaagggtaggtatatgtaaaatagatgaagggtgaggatcaatcacagaaagcatgacaaacaggaaaacaagttctcaagtcagtctgaggatttaacttgcagcttggttttcaggctttaagctctttggctcggaggtggggtttcaccatggagccacccctatctgcctaggtatttggctgcctcctgctactctgatagccaccaccacaatacattttagaacatttttaacaccctaataaagaaacttgggactcattagcagtcaatcccaatctcctcctccctaacatctccagccctaggcaaccactattctacttttctctatagattttcctgtgctgaatatttcatataaatagcaccaaataatatgtggtttttgtgtctggttcctctcacttagcataatattttcaaggttcatccatgttacagtacatatcagtacttcatttctttttattgctgaataatattccattgtatggatataacacgtttcttttccattcatcacttgatatttaatggtttccactttttgtctgttaggaacagtgctgtaatatacattcatgtaccaagtttttatgtggacatatattaataatttcatttctgctgggtatgtaactaggagtagaattgctgcatcataaagtwattctatatttaatctgagggactgttagacctgttttccagagtgatgatacyattttatattcccacaagtgtccycatggatacttgttattatctgtttcttaaattatggccatcctagtagatgtgaagtggtatctcattgtgattttctttggcatttctctagtgtctaaggatgatgagaaagttttcatgagtttaatggccatttgaatattgtctttggtgaaatatacattggttttaaataaacattgcttcataataacacaactttaaagataaacagaatgaggagaaaatagaaaaaaagttaatgtagataaytctttagataagctttgctgtgaatagaagcagtgaaaggagataattcaaaggacatgtgagttgaagaaaggcttgcaaatgttccggttcagcaatttcttttatgccacagtgataatagtagcccacagtcacagtctcagtgggcacagagtgagggaggcaaagtgagggacagaaatggggaaggaagaggaacacaggagggaactgagtttattgcaaaatgcagaagaatggttgaataatagaagagtcaccttgtctggcagaagtgttgaaaatgggctcttgtaggggcagaagaaaagcactcaggccattggataggcagactttttcccttgagaatccatgactcttgtcaccctttgcttccctctctacccagggactttactgctttacaacctaaggaaccagctaaaacaacagcaacaacgataacaacaaacccaattctcacccgccgcacctgcccccaccacccgcaaaaarcaaatccaaacaaaaaactatttaaaaatcacacaattcacaaaaagcgtctcaagagtatgttaatgtaaataccatttgtattaaacccttaccttatttaaacgtacacatagrgcttgactttaagaaacccatgcatgaattatttgaataactgaactaatgaagggtgaaattaaaataaatatattcaaataatgagaggyggtataagtgaagggaaatatggtttaaattctgagtcttataaaaataatatgtatgtacatgtagtacaactattaaaatttgggctattcttgtttcttaatatttttgtgtataatgataaaaaacaataaaagaaataaagctatttgatttggatgtacagagaaaaatccaagctatgggaagtacattgtgacccccaggtgtatacatatgtacataagctggggttaagctattgccttaattttagccccacccatgtacactctgtgacgctgcctgggattctacaaatcacatttatcttttgccactaagctccctgttaggatctgccaatcagaggacgctaggggcggactggaaggctgagtggggaagaaggaagacacttcctgtttgcttcctgttctgtttaacgacaccctaasgattacttttcatttcagcagttatagtttgtttcagtagcaacagttatttccagttttagttttgacagcattcctagaactagctccttagggttttttaaagacaccaacgccaaccagcaagcgccccctactgagcggtctaggtcccagctctgagaagccactcaagtttctaagtttagtatttatattataattctaacctcttccctttgttgtctcagcactaggtagctgcttcctatgttgcttataccatgatattttagtattccctcttgccttctccatttttcaatatctggtcggatagcaattctttatattgaattatttctgtaaaaataactgttggggtttctattctatatcttagatggactctaactgaattaatacatatgtaaatatatggtgaatatatataaattataaacatatgtctctatatgtatatatagatatgtgtctctatatcaatgtatgtattatagatatatacatatatgtatatatagaaccatagataattctccttaatatgcatgtacatagatatgtacatccatattatatgatatagaatatataaatataatatctaatatatgcatattaaggagaattatctatggttctaaatatgcrttatacatatctatatgcatactgtatatcatataatacatatccatgtacatgcatattaaggagaactatttacggtttttggtctcatttgtaatgctcataaaaattttctcttttaattttaatttcattgaaaccatccttggactcatacttggagacaaacttacttggtcactatatattattattttgacacactttggtgttcagttagctaagttagaaatttagtttatgtgtttattagttaaaataaataattgactttccttgtactgtctttttctggttttgatgtcagtgttgtttagctttgaggaatgggctaggaaatgtttcatatattttgaaataatttgtataaattggaattatttgtttcttaaaggtttatggaacatctaaagaacaaattcatctggctctcatacagtttttaggatactactttgattgacatttcagtttcttttagatctatatcttctatttttcttgaggctattttgataattatttcttaagatattatcaattttcatctagataawaaaatatatcattttatgtatttttaaattcatcgatatttccacttttcattgacaacattattaagttttattgtgtctcttttttcaaattatacttgatgaaattttgaaaatgattggtctttccaaaaatcacctttaggttttattgataaactttttcttattttctaagtcaggatacaaaatcagtgtacaaaaatcacaagcattcttatacaccaataacagacaaacagagagccaaatcatgagtgaactcccattcacaattgcttcaaagagaataaaatacctaggaatccaacttacaagggaggtgaaggacctcttcaaggagaactacaaaccactgctcaaggaaataaaagaggatacaaacaaatggaagaacattccatgctcatgggtaggaagaatcaatatcgtgaaaatggccatactgcctaaggtaatttacagattcaatgccatccccatcaagctaccaatgactttcttcacagaattggaaaaaactactttaaagttcatatggaaccaaaaaagagcccgcatcaccaaggcaatcctaagccaaaagaacaaagctggaggcatcacactacctgacttcaaactatactacaaggctgtagtaaccaaaacagcatggtactggtaccaaaacagagatatagaccaatggaacagaacagagccctcagaaataaygccgcatatctacaactatctgatctttgacaaacctgagaaaaacaagcaatggggaaaggattccctatttaataaatggtgctgggaaaactggctagccatatgtagaaagctgaaactggatcccttccttacaccttatacaaaaatcaattcaagatggattaaagacttaaacgttagacctaaaaccataaaaaccctagaagaaaacctaggcatcaccattcaggacataggcatgggcaaggacttcatgtccaaaacaccaaaaggaatggcaacaaaagccaaaattgaccactgggatctaattaaaytaaagagctgcacagcaaaagaaactaccatcagagtgaacaggcaacctacaaaatgggagaaaattttcgcaacctactcatctgacaaagggctaatatccagaatctacaatgaactcaaacaaatttacaagaaaaaaamaaacaaccccatcaaaaagtgggcgaaggacatgaacagacacctatcaaaagaagacatttatgcagccaaaaaacacatgaaaaaatgctcatcatcactggccatccgagaaatgcaaatcaaaaccacaatcagataccatctcacaccagttagaatggcaatcattaaaaagtcaggaaacaacaggtgctggagaggatgtggagaaataggaacacttttacactgttggtgggactgtaaactagttcaaccattgtggaagtcagtgtggcgattcctcagggatctagaactagtttattaatttcttttaaaaaatcttcaataattctaccctaattttctgagcattttcttagccatctgaaagcttagttcaacaattttcaatgttttgttttttaatactaccttggcataacactgagggtatatccttattttctcattctcacactctcaatagttctatgtagtttgtaattttcattttgctgttcccttgwcctaaaagtaattttgaatgcgaagagcacttttcagtcacttaatttttaaaataaattttattgtgtacatttaaagtatacagcattatgttatggaatacacataggtagtaaaaatttattatggtgaagaaaattaacatatacataatctcatataggaagaaaaaactttgtgtgtggaaagagcagctaaaatctactgatttagcatgaattctatgtacagtacaattttattacctatagtcttcatcttgtgcattagatctctacatttgtttagcctatatatctgctactttggttttttttatttacttttaatttttgtgggtatacagtaagtgtatatatttatggggtacatgaggtgttttcatacaggcatgtaatatcaaataagcacatcgtggagaatgggatatccaccccctcaagcatttattcttggagttacaaacaatccatttctattctttcagttattttaaaatgtacaaataarttgttattgattatagtctccctgttrtgctatctactaattaatagtagttcttattcataccttctattwttttttgtgcccattaaacatccctacctcccccaccaccaacatcccactatccttcctggcttctggtaaccatccttctactctctctgtccatgagtttaatagttttaatttttagatcccacaataagtgagaacatgtgatgtttgtctttctgtgcctagttcatttcactccacatgatctccagttccatccatccaggttgttgcaaatgactggatctcattctttttataactgagtaggaattcattatgtatatataccacattttctttatccatttatctgttgataggcacttagattgcttccaaattttagctattttaaacagtgctgcaacacacttaggagtgcagatatttcttggatataatgatttcctttcttttgggtgtatacccagcagtgggattgctggatcatatggtagctcaatttttagttttttgaggagcctccaaactgttttccctagttattttgccaatttacattcccaccagcagtgtacaagggttcccttttctctacatccgtaccagcatttgttatttgcctgtcttttggatataagccattttaactggggtgagatgatatctcattgtagttttgagttgcatttctttgatgatcagtgatgttgagtacattttcatatccctatttgccatttgtatgtcttttcagaaatgtctattcaaatcttttgtccatttttaatcaggttattagtttttttatagacgtgcttgaactccttatatattctggttattaatcccttgtcagatgagtagtttgcaaatatcttatttcactctgtggattgtctcttcacttagttgattgtatcctctgttgtacagaagctttttaacttgatgtgatctcatttgtccatttttgtttggttgccttgcttgtggcatattgttcaagatgtttttttttgcccagaccaacatcctgaagatttttccccaaagttttcttgtagtagttttatagtttgaggtattagatttaagtttttaatgtgttttgatttgatttttgtatatgatgaaagatagaggtctattttcattcttctgcatatgaatatcccgtttccccagaaccatttactgaagagtctctcttttccccagtgtatattctttgcacctttgttgaaaatgagcatacctgtgtggatttgtttctgggtcctctatactgttccattggtctgtccattgtcctgtgtatgtcttgaaaagttgtagtagttattatttttgattggttcattatttcatctttctacttaaaataagagaaatttacacactacagtttcagtgtatagtattctgtgtttttctaggtacttactatttctaatgagttttgtacttttagataatttctgattgctcattaacatgcttttctttctgattgaagtactccctttataagtactccttttacaagtactccctttacaagcatttcttgtaggacaggtctgctgttgatgaaatccttcagcttttgtttgtctgtgaaaatcattatttctccttaatgtttgaagggtattttttgccaaatatactgttctagcataaaggttattttccttcagcactttaagtacatcataccactctctcctggcctgtaaggtttccactgaaaagtctgctgctaggcatattggctctccattgtatgttatttgtttcatttttcttgctgcttttaggatccctgctttatccttgatctctggcagattgattattaaatacttgccattttgagtctattttctagatcctgtaggtgtgcttcattgttttttattatttttatttttttttctcttgyctcctctgtgtatcaaatagcttgtcttcaggctcacacgttctttcttttggttgattaattttgctattaaagkactctgctgtatttttcattatgccaattgcatttttcagcttcagaatttctgcttgattctttttaattatttcaatctctgttaaatttatctgataagattctgaattccttctctgtgttatcttgagtttctttgagtttccataacacagcggttttgaattccttgtctgaaatttcacatatctctgtttctctaggatgggtccctgctgccttatttagttcatttggtgagttcatgttttcctggatagtgttgatgctagcagatgttgttcaatgtctgggcgttgaagagttagatatttattgtagtcttcactgtctaggcttatttgtagccatcctttttgaaaggacttgggtgttgtgatctaagctatatctgctttagcagcaccccaagcccagtaatgctgtggttcttgcagacttgtaaaggatcaccttgatggacttagacaagatccaggagaattttctggattactaggtagagactcttgtyctcttcccttactttctcccaaacaaacagaatctctttctgttctgagtcacctaaagctgggggtggagtgacacaaacacccctgtgaccacctccagtatgactgtgctgagtcagaactgaagccagcacagcactgggtctgcggtaaccactccctggctaatgcctatgttcatataaggccctgaggctctacaatcagctgattgcaaagccaatcaggtctgtattcttcccttcagggcagtaaggttccctaggcccaggtggatccagaagtgctatctaggagttagggactagagttaaacacctagcagtctatctggtgttctattgtactgtggaggaactggcactctaaccacaagatgcagttattctcactcttccctcctctttccaaaggcagaggaacctcaccctgtagccactgccaccccaggccataaggaatactgtcagactgactacctccaatgtttctttaagatccaagagctcttaagtcagcttgtggtgaatgtttcctggcctgggactcatccttcagagcagtggactccactctggcccaggacagagccagaaattttatgcaatagtcaaatcctggaactggggagcccaagagcttgcttggtgctctacccaccctatggctgtgctgatacctgaagccagcaagtctcagaggcttacccaatgcccttgatgtggtacctgagtatcgcttctggtttttcagggacgaaaagctcttcagttagcagaagatgaatgctgccaggattggatcctttctctcaaggttatgggttcttttatgacccaaggtgtgtctaaaatgttcatgtgggaggtagggcccagaacaggggccttttgactctgaccactgccctatcctgctatggctgagctggtatccaagatccaakacaaagtcctcccaacttttccctctcctcttctgaagtggaagaaagggatttcttttcgagctgtgagctgtgaagcctgggggtaggggaggggtgatgccggcactcctttatccacctcagctggtgtctcagtatgtcatgtgccccccccccccccccccagtccactgtttcaggacctggttcagcactgggactcacctaattgttgcagaccttatggactacattggctttcaagtttgtttggagacacagagcactttggtcactggtagtgaggtttgcaggaactcaagttctgacctctgggatccatgatccctctctgagtagtgccggtttaaatgcttccctcgtgggcaggtgtcagctgagtytggtccggtttccctttctgctccacctggatagcacaaaatttaatgtctcacagttgctatgttctctctcctctagcacccagagatgctctctgcaccatgccatgacttccagggggtggagaacaggtaatgtcaggggttcagggctcttttttctatctcttcagttgcctctttcagtgatatgaagttaaaaccaggtactatgagtgctcatctgatttttggttcttatgaagctgtttttttttttttttttttctgtgtagatagttgttaaattggtatctttgtggagaaggcaatcagtggagccttctgtkcggccatcttgctccttatacctgctactttgtattctctgatctatgtctcttcatttctccactcctctgttccaaccacccctggtaaccatgtttgtcttctctatttctgtatatttatttacttattttagaatctacttataaatgagatcatgcagtatttttctttctgtgtctggtttatttcacttgtcataatgtcctccaccctctttcatgttgtggcaaatggcaagatctcattcttttttaaggctgaagaatatcccattgtatatatgtactacagtttctttatccattcatccatcaatggccacttaggttaggttgtttccatatcttggctattgtagaaaatactgcaatgaatatggaagtgggttatctttatgaggtgttgatttcatttcctttgggtatgcccagaagmgatattactgggacatgtgggagttctatttttaacttctttagaaaccaccatactcttttctataatggccacaccaatgtacattcccactaacagtgtatacaagttcccttttcttcatactcttactgacatttgttatcttcagttacttaatttttattggtgggaagggggctttattaacatttttttgttgagattattcatttctaattttttgcactattattggtgcttgctacaatttctagtttttgtttcataatttcaacttttagattcagggaatacatgtacttgtcacttgggtatattgtgtgatggtgagctttggggtatgatggattttgtcacccaggtactgagcatactactcactagttagtttttaagcctttgttcccctctctacctccacacttggtagtcccaagtgtctatttttgccatctttgtgtcattgagtacccattgtttaacttccacttataagtgagaatatgtgatatttggttttctgtttctaggttaatttacttaggataatggactcgggctgcattcatgtagctgcaaagaacatgattttgttatttttaatgtctacatagcatttcatggcatatatgtaccacattttctttgtctaatccaccgttggtgggcacctaggttgattccacttctttgctattgtgaatagtgctgcaatgaacatatgactacatgtgtcttttgggtagaataatttattttcttttggatatatacccagtaatgggaatgttgggttgactggtagttctgttttaagttctttgagaaatctccaaactgctttccayggtgggtgaactaatttacattcctaccaacagggtataacattcccttttctcaacagcctcaccagcctttgttgtttttgacttttcaataatggtcataatgactggtgtgagatggtatctcattgtggttttgatttcatttatttgatgattattgatggtgagcatatttttatgtttgttggctgcttgtatgtcttcttttgaaaagtacctgttcatgtcgtttgcccatgtttaatggggttatttgtattttgcttgttcaattgtttaagttccttatagattctggacattagatcattgtcagattcatagtttgctaatattttctcccattcattaggttgtctgtttacttcgttgataatttcttttgttgtgcagaagctcccaggtttaattgggtcccacttgtcaatttttgtttttgttgcaattgtttttgagcacttagtcataaattctttcccaaggctgatatccactatggtgtttctcagattttcttctaggattcttatagtttgaagtttttcatttaaatctttaatttgtcttgagttaatttttgcaaatggtgaaagatgggggttcagttttattcttctgcatatggctagccagctgttctaacaccatttgttgaataaggagtcctttccccattgcttctttttgttgaccttgtcaaagatcagatagctgtatacatgtagctttatttccgggttctttattctgttccattggtctatgtgtctgtttttgtatcagtaccatactgtttgggttactgtagctgtatagtatagtttgaagtcaggtaatgtgatgcctccagctttgttctttctgcttaggattggtttggctattcaggctcttttttaagttctgtatgaattttagaatagttttttttctagttctgtgaaaaatgacattggtagcttgaaaggaataccattgaatctacagtttgggcagtattgccatttgaatgacagtgattcttctaatacataagcatgaaatgttttttcatttgtttgtgtcatccatgatttctttcagcagtgttttgtagttctctttgtagagatcttttacctccttggttagaggtattcgtaggtatttcatggtttttgcagcagttgtaaaygggattgctttcttggttttgctctcagtttgagtgttattagtatgtggaaatgaaactgatttttgtacattgattttgtatcctgaaactttattgaaattgtttattttatatatatatatattattatactttaagttctagggtacatgtgcacaacgtgcaggtttgttacatatgtatacatgtgccatgttggtgtgctgcacccattaacttgtcatttatwttaggtatatcccctaatgctgtccctccccacttccccaccccacaacaggctccagtgtgtgatgttccccttcctgtgtccaagtgttctcattgttcaattcccacctawgagtgagaatatgcggtgtttggttttttatccttgcgatagtttgctgagaatgatggtttccagcttcgtccaagtccctacaaaggacatgaactcatcatttttcacggctgcatagtattccatagtgtatatgtgccacgttttcttaatccagtctatcattgatggacatttgggttggttccaagtctttgctattgtgaatagtgccacaataaacatacatgtgcatgtgtctttgtagcagcatgacttctaatcctttgggtatatacccagtaatgggattgctgggtcaaatggtatttctagttctagatccctgaggaatcaccacactgtcttccacaatggttgaactagtttacagtcccaccaacaatgtaaaagtgttcctatttctccacatcctctccagcacctgttgtttcctgactttttaatgatcgccattctaactggtgtgagatggtatctcattgtggttttgatttgcatttctcrgatggccagtgatgatgagcattttttcatgtgtctgttggctgcataaaggtcttcttttgagaagtatctgttcatatcctttgcccacttgttgatagggctgtttttttcttgtaaatttgtttgagttctttgcagattctggatattagctctttgtcagatgagtagattgcaaaaattttctcccattctgtaggttgtctgttcactctgatggtagtttcttttgctgtgcagaagctctttagtttaattagatcccatttgtcaattttggcttttgttaccattgcttttggtattttagacatgaagtccttgcccgtgcctatgtcctgaatggtactacctggttttcttctagggtttttatggttttagttctaatatgtaagtctttaatccatcttgaattaatttttgtataagatgtaaggaagggatccagtttcagctttctacatatggctagccagttttctcagcaccatttgttaaatagggaattgtttccccatttcttgtttttgtcaggattgtcaaagatcagatggttgtagatgtgtggtattatttctgagggctctgttctgttccattggtctatatctctgttttgttaccactacctgctgttttggttactgtagccttgtagtatagtttgaagtcagataacatgatgtctccagctttgttctttttgtttaggattgtcttggcaatgtgrgcccttttttggttccatatgaacttgaaagtagttttttacaattctgtgaagcaagtcattggtagcttgatagggatggcactgaatctataaattaccttgggcagtatggccattttcatgatatcgattcttcctatccatgagcatggaatgttcttccatttgtttgtatcctcttttatttcattgagcagtggtttgtagttctccttgaagaggtccttcacatctcttataagttggattcctaggtattttattctctttgaagcaattgtgaatgggagttcactcatgatttggctctctgtttgtstgttattggtgtataggaatgcttgtgatttttgtacatttattttatgtcctgagactttgctgaagttgcttatcagcttagggagattttgggctgagacgatggggttttctaaatatacaatcatgtcatctgcaarcagggacaatttgacttcctcatttcctaattgaataccctttatttctttctcctgcctgattgtctctgaagatagaccaatagcaggctctgaaattgaggtaataattaatagcttacctaccaaaaawagtccaggaccagatggattcacagccaaattctaccagaggtacaaggaggagctggtaccattccttctgaaactcttccaatcaatagaaaaagagggaatcctccctaactcatttcatgaggccagtgtcatcctgataccaaagactggcagagacacaacaaaaaaagagaattttagaccaatatccctgatgaacatmggtgcaaaaatcctcagtaaaatactggcaaaccgaatccagcagcacatcaaaaagcttatccaccgtgatcaagtgtgtttcatccctgggatgcaaggctggttcaacatacacaaatcaataaatgtaatccagcatataaacagaactaaagacaaaaaccacatgattatctcaatagatgcagaaaacacctttgagaaaattcaacagcycttcatgctaaaaactctcaataaattaggtattgatgggacatatctcaaaataataagagctatttgtgataaacccacagccaatattatactgaattggcaaaaactggaagcattccctttgaaaactggcacaagacagggatgccctttctcaccactcctattcaacatagtgttggaagttctggccagggcagtcaggcaaycagaaattggttatttgttccagtagtcttttggaggagtctttatggcttactcagtatagatcatatcatcagcaaagagagataatttgatttttttacctatgtggatgccttttatttctttctcttgcctgattcctctgggaaggacttgcagtactctattgaataggagtggtgagagttggcaaccttggcttgttccagttcttaaagagaatgctccccgtttttgcctgttcactacaatgttggctgtgggtttgtcatagatgtctcttattgttttgatatatgttccttcagtgcctagttttttgagaacttttaccaagaagggatgttggactatattgaaagttttttgcatctattgagatgataatattgttkttgttcttaattctgtatatgtggtgaatcacatttgttgatttgcatatgttgaaccaaatttgtawcccaagamttaagcctacttggtcacggtgaatgaactttttgatgtgctgctggattcaatttgttagtattttgttgaggatttttgtatctatgttcgtcatggatattggcctgtaattttctttttaagttgcgtctttgccaggtttggttattagagtaggctgacttcatagaataagttaaggaagagtccctcctcctcaatttttagaaatagtttcagtaggattggtaacagctcttctttgtgcatctggtagaatttggctggtgtgtatccatctggtctggggcaccttttttttttggtatctttttttttgttgctgattcaattttggaacttgatatttgtctcttcagggattcaatattttcctgattcagtcttgggagattatgtatttccaacgatttatccatttcctccagattagctagttcatgtgcatagaggtgttcataatagtcattgaggatcatttatatttttgtgggatttgttgcaatgtcacctttgttatttctgattgtgcttatttggatcttctctcttctgtttgttaaccttgttagtggtctattgatctcttctgtcctttcaaagaaacaacttttggttgcactgattgtataaattttgaggtctcaattttgttcagttctgccctcattgatttcttttatttttctagctttggggttagttttttgtatttctagtgtgatgttagattattaaattgagatatttctaccttcttgatgtaggagttcagcactatacactttcctcttaacactacttttgcagcatcccagagatttttggtatgtcgtctctctgtttttattcctttcaaataayttttttttgatttctacctttattttgttgtttaccccaaactcattcaggataagctgtttaaatcccatgtaatggggttttgagagatctgttggtattaatttctatttttattccactgtggtccaaaaatatggctagtatgatttcagtttttttgaatttagagacttgctttatggctaagcatgtgattgatcatggagtatattctgtgtgcagacaagaagactgtatattctgtcattgttgggtagagtattctgtagatgtgtattaggtccaaatggtcaagtgttgaatttaagtccagaatttctttgctagttttctgccttgatgatctgtgtaaggggatcagtggggtgttgaagtcccctgctattcttgtgaggctgtgtaaatcttttctaggtcaaaaagtacttgttttatgagtctgggtgctcccatgttgggtgcatacatatttagcatagttaagtctttttgttgaattgaaccctttatcattatgtaatgtccttctttgtccytttttactgytgttgatttaaagtctgtttttttctatgagaatagcaaccttagctcttttttgtgttccatttgcatgatagatcttttccaaccctttactttgagcctatgggtgtcattacatgtgagattggtctcttgaagacaacagtcaaatgggtcttgtatctttgtacaaattgccactctgtgccttttaagtgaggaaatttagaccatttacattcaagattgactattgatatgtgaggctttgatcctctcatggagttgttaggtggtggtttgtagtttctattgtttggttgctttatatggtctgtgggctatgtacttaagtggtttttttttggtggagcaagtatatttctttcatttctatgtttaaatcttccttgaggatctcttataagggtggtctagtgttaataaatccccttagtgcttggttgtctgaaaaatattttattttttctttgcttatgaattttagtttggcaggatatgaaatcttggttggaatttcktttctttaacaatgctggaaataggcccccaatctgttctggcttataaggtttctgctgagaagtccagtgttagactgacggggttccctttgtgagtgttctgacctttttctctagctgtctttaagatttttgctttagcattgaccttagacagtctggtgacaatctgcctgggtgatgttcatttagtatattatgtcacaggcattctctgtatttcytttgcttggatgtctacctgtctaggaagattagataacttttcttgaattattccctcaaatgttttctagattgttttctttgtctctctttctctcaggagtgccaataattcataggtttggtcacttcatataatcccatatttcttgaagaccgtttatttttaaaattcttttttctttacttttgtctgactgggttagtttgaaagattgatccttaagctctaaaattctttcttctgcttggtccagagagatggagtcttgctttgttgcccagactggtcttgaactcctggcttcaagtgatcctcctgcttcagcctcccaaagtgctggaattacaggtgtaattcagtgtgtctggcctttggcttacacttttattataatttgtcctgtctaaggtttctttttcatattgttatttttggttttcctctgtgctttcatgttaaggatgtcacttataaacaatgcatagcaagcttcttttttttaacctaatctgtgaattgctatattttaatagatagcttagccctggcatatgtattatagctaataatgaatttaacttttttctgtgattttattttgttttctttttacttcacttgctatatatttctctttacctcctttccagccttttgttagaatgatattttttctctttttttctcattctaatggtttggaagataatgctattctgagtaattattagtaaatttctatcatacaaacttatgtttgttcatctcattttttttgccaaagttcagttattcagtatcctgaccttccccattatttacataggtatctctgcactttctcattttcatataatttgaaatttgagtttgatagctactatgattttattgttctagcctgtcaatatgcttagacaattttaagtagccttcttttcttatcattacctttttaactccactttttctttttgtattttatttttgttttgctttttttttgttgctcttctcattcctctattcattgcatcctctaataattcttttcagacagcatttccaagtggtaaatgatgtcagtctttttctttctttctgtaatttctatatatttgaaatcctgtatttatctaactcttygtatttaccaggttagataaaactaatctggttaatttttatttctatagtaaaatttttttattataccttaagttctagggtacatgtgcacaaggtgcaggtttgatacataggtrtacatgtgccatgttgctttgcagcacccatcactcatcatttacattaggtatttctcctagtgctatmcctccccagcccccagccccccaacaggcctcactatgtgatgttccctgctctatatccaagtgatctcattgttcaattcccacctatgggtgagaacatgwggtgcttggttttcatccttgtgacagtttgctcagaatgatggtttccagcrtcatccatgtccctgaaaaggacgtgaactcatccttttttatggctgcatagtattccatggtgtatatatgccacattttcttaatccagtctatcattgatggacatttgggttggttacaagtctttggtattgtgaatagtgctgcaataaacatacatgtacatgtgtctttatagtagcatgacttctaatcctttgggtatatacccagtaatgggatggctgggtcaaatggtaattctagttctagatccttgaggaatcgccacactgtcttccacaatggttgagctaatttacattcccacaaacagtatgaaagcattcctatttctccacatcctctccagcgtctgttgtttcctgactttttaatgatcgccattctaactggtgtgagatggtatctcattgtggttttgatttacatttctttgatgacaagtgacgatgggcattttttcatgtgtctgttggctgcatagatgtcttcttttgagaagtgtctgttcatatcctttgctcactttttgatgggcttgtttttttcttataaatttgtttaagttctttgtagattctggatattagccctttgtcagatgggtagattgcaaaaattttttcccattatgtaggttgccggttcactctgatggtagtttyttttgccatgcagaagctctttagtttaattagatcccatttgcctactttggcttttgttgccattgcttttggtattttagtcatgaagtccttgcctatgcctatgtcctgtatggtattacctaggttttcttctagggtatttatagttttaggcctaacattcaagtctttaatccatcttgaattaatttttgtataaggtataaggaagggatccagtttcagctttctacatatggctagccagtttttccagcacgatgtattaaatagggaatcatttcccyatttcttgtttttgtcaggtttgtcaaagatcagatggttgtagatgtgtggtattatttctgaggcttctattctgttccatttgtctatatctctgttttggtaccagtaccctgctgttttggttactgtagccttgtagtatagtttgaagtcaggtagtgtgatgcctccagctttgttctttttgcttaggattgattgacttggcaatgtgagctcttatttggttccatgtgaactttaagtagttttttccaattctgtgaagcaagtcattggtagcttgatggggatggcattgaatctataaattactttgggcagtatggccattttcacgatatttattcttcctatccatgagcatggaatattcttacatttgtttgtgtcctcttttatttcgttgagcaggggtttatagttctccttgaagaggtccttcacatctctcgtaagttggattcctaggtattttattttctttgtagcaattgtgaatgggagttcactcatgatttggctctctgtctattattggtgtataagaatgcttgtgatttttacacattgattttgtatcctgagagtttgctgaagttacttgtcagcttaaggagattttgggctgagatgatggggttttctaaatatacaatcatgtcatctgcaaacagggacaatttgacttcctcatttcctaattgaataccctttatttctttctcttgcctgattgccttggctggaacttccaacactatgttgaataggagtggtgagagggggcatccttgtcttgtgccggttttcaaagggaatgcttccagtttttgtccattcggtatgatattggttgtgggtttgtcatagatagctcttattattttgagatacmttccctcaatacctagtttattgagagtttttagcatgaagagctgtcgaattttgttgaaggccttttctgcatctattgagacaatcatgtggtttttgtcatttgttctgttaatgcaatggattatgtttattgatttgtgtatgttgaaccagtcttgcatcccagggaggaatctgacttggtcatggtggataagatttttgatgtgctgctggatttgttttgccagtattttattgaggatttttgcaccaatgttcatcagagatattggtctaaaattctcttttttttgttgtttctctgacaggctttggtatcagtttgatgttggcctcataaaatgagttagggaggattctctctttttctattgattggaatagtttcagaaggaatagtaccagctcctctttgtacctctggtagaattcagctgtgaatccatctggtcctggagtttttttggttggtagcctattaattattacctcaatttcagagcctgttattgatctattcagagattcaacttcttcctggtttagtcttgggagggtgtaggtgtccagaaatgtatccatttcttctagattttctagtttayttgtgtagaggtgtttataatgttctctgatggtagtttgtatttttgtggaatcgatggtgatatcccctttatcrttttttattgtgtctatttgactcttccctgttttcttctttattagtcttgctagctataattttgttgatcttttcaaaaaaccagctcctggattcattgattttttgaagggtttttttaatgtatctatctctttcagttctgctctsttcttagttatttcttgccttctgctagcttttgaatgtgtttgctctggcttctctagttcttttaattgtgatgttagggtgtcgattttaaatctttcctgttttctcttgtgggcatttagtggtataaatttccctgtacacactgctttaaatgtgtcccagagattctggtatgttgtgtccttgttctcattggtttcaaagaacatctttatttcttccttcatttcgttatttacccagcagttatttaggagcaagttgctcactttccatctagttgtgtggttttgagtgagtttcttaatcctgagttctaatttgattgcactgtggtctraaagacagtttgttgtgattgctgttcttttacatttkctgaggagtgctttacttccaactatgtggtcaattttaraataagtgtgatgtggtgctgagaagaatgtatattccgttgatttggggtggagagttctgtagatgtctattaggtctgcttgttgcagagctgagttcaggtcctggatatccttattaaccttctgtcttgttgatctgtctaatattgacagtggggtgttaaagtstcccattattattgtgtgggagtctaagtctctttgtaggtctctaaggacttgctttatgaatctgggtgctcctgtattgcatgcatatatattaggatagttagctcttcttgttgaattgatccctttaccattatgtaatggccttctttgtctcttttgatctttgttggtttaaagtctgttttatcagagactaggattgcaacccctgcttttttttgctttccatttgcttggtagatcttcctccatccctttattttgagcctatgtgtgtctctgcatgtgagatgggtctcctgaatacagcacactgatagatgttgactctttattcaatttgccagtctgtgtcttttaattggtacatttagcccatctacatttaaggttaatattgttatgtgtgaattcatcctgtcattatgatgttcgctggttatttcgcccattaattgatgcagtttcttcatgccatcaatggtctttacaatttggcctgtttttgcagtsgctggtaccagttgtttctttccctgtttagtgcttccttcaggagctcttgtaaggcaggcctggttgtgacaaaactctcagcatttgcttgtctgtaaaggattttatttctccttcacttatgaagcttagtttggctggatacaaaattctggtttgaaaattcttttctttaagaatgttgaatattggccccccactctcttctggcttgtaaggtttctgccgagatatctgctgttagtctgatgggcttccctttgtgggtaacctgatctttctctctggctgcccttaamattttttccttcatttcaaccttggtgaatctgacaattatgtgtcttggggttgctcttctcgaggagtatctttgtcgtgttttctgtatttcctgaatttgaatgttggcctgccttgctaggttggggaagttctcctggataatatcctgaagagtattttccaacttggctccattctccccatcactttcaggtacaccaatcaaatgtagatttggtcttttcacatagtcccacatttcttggaggctttgttcttctctttttactcttttttctctaaccttgtcttctcactttatgtcattaatttgatctttaatcactgatacactttcttccacttgatcgaagcagctgttgaagcttgtgcatgcatcatgaagttcttgtgccgtggttttcagctccatcaggtcatttaaggtcttctcttcactctttattgtagttagctattcatctaatctttcttcaaggtttttagcttccttgcaatgggtttgaacatcctcctttagctcrgagaagtttattaccaaccttctgaaacctacttctgtcaactygtcaaagtcattccccatccagctttgttctgttgctgacgaggagctgtgatcctttgaaggagaagagtcgctctgatttttagaattttcagcttttctgctctggtttctccccatctctgtgtttttatctgcctttggtctttgatgttggtgacctatagatggggtttttgtgtagatgactttttgttgatgttgctgctattcctttatgtttgttagttttccttctaacagtcaggtccctcagctgcaggtctgttggattttgctggacatccactccagaccctatttgcctgggtatcaccagcagaggctgcagaatagcaaatattgttacctgatccttcctctggatgctttgtccaagaggggcagccacctatatgaggtgcctgtyggcccctactgggaggtgtcacccagttagtcagggacccacttgaggaggcagtctgtccattctcagagctcaaccaccatgctgggagaaccactgctgtcttcagagctgtcagwcagggatgtttaagtctgtagaagttgtctgctttcttttgttcagctatgccctacccacagaggtggagactagaggcagtaggccttgttgagctgcagtgggctctgcccagttcaagcttccaggccactttgtttacctactgaagcctcagcaatggcggacacccctcacccagccaggctgtcgyctcacaggttgatctcagactgctgcactagcagggagcaaggctccatgagcatgggagctgccaagctaggcataggagagaatctccttgtctgctggttgctaagaccttaggaaaagcagggtatttgggcggaagtgtcctgtttttccaggtagtctgtctcggcttcccttggctaggaaggggaaatcccctgaccccttgtgcttcccaggtgaggtgacgcccttccctgcttcagcttgccctccatgggctgcacccactgttcaaccagtcccaatgagacgaaccaggtacctcagttggaagtccagaaatcacccattttctgcgtcgatcacacttggagtttcagaccagagctgttcctatgtggccatcttggaatgcccctatatagtcaaaattttaatctcttccatcttatgttgattttatttaaggatgaaattttaaaatatgttttggagaatattatttataattataaaaagtcttgtcctgctcactgtaaattttcttgctttgcatataaatttcttctctttgttgagtcacatattgtttcttcatggtattggctttctctaaatattttatgattcttgcatatcttctgaaattccctattaaactcagaaaagggtgtatctgtttttgcattctgcttggtgggagaaagaggaccaatttttgaacatgaaaataagtagataagaatctgtgccctgggctcaccatttctactgggtgttgacagttgcctgaagcacaactttgtctctctgacccagtgttttgccactctcctccacctgaagaagatttttttttttctattgcttggctcttgggcaggttgaggagagaagagaggagatgaaggatgtgtaggttgctcctgctgtaaagatcygccctattttgcctggcccctgtcctatttctagtttctgctaccttcagacatgaggttactggtgcttctcctgtcttttgtagtttcgactctcttaagtgcatttgggctgtggttcccatctccaattcaatcttctgctttctgccttttaaagtcctgacagtatctcctttttttttgttttctgttgttgagatagatttatttattaggttggtgcaaaagtaattgtggttttggcaattttaatggaaaaaaaaaaacacaattacttttgcaccgacattttttttcttcttttagcttgtaaaggaatttgtaccagaagtggaggctgccctgaatgctcagtccatcatcttgaactggaaccacccttcacttcttaagataattttcatcatgcaaaaagagtgaaattcagtagtctcttcaacatcctatatgtattcttttggttttggctgtgtttttgttttttaaccataactcataaagcataagaatggctaccagaattaatgttaagcagttagcagctacttagggctatagtttttagttatgtttttacagtatatatttccatcctatgttctcttactctagaaaatgtaagataaatctagggctatccctgtataattttagcctcatagaatcttgaaatgaagaataggtgttgaccagttttttagaaacagggtagggggtcttgttctttcatcraggctggagtgcagtggtctaatcatagctcactacagccttgacctcctgggctcaagccatcttcccaccttccaagtagttgggattagagtcatgagccaccatgcttggctccagttttcttatttgtttgccaagtggattgtcttcttttctgttattcaaacaaataaatatgcaaaacagcaaaaaaagttttgcagacacggtggaaatatccaaggagtttttttaaagtatggggttcaatttgaattttactaccttctgaatataccttaattaatattgaaattgatcaatggattggagacatttgttaatgatcacaaaataattttgctgattaggatcaaacacagagtctccatgtaatgatttggaagggtgtttaatgaaagctgcaatattgcctacattgttttcatggactttgctggaagcatctttgaaacttaatggcaacttattattatattcaatggtctaataagacaaattcagaaaaaaattttgggctgatcccctgaagtttcaacatttaaatagtctaggaagtattggtgggtgtgtgattttattcccagatccttaataggctgttaagtaggtggctccacacacacccactttacatttttcttgtcacatgtgattcatttttattccacatttaaaaatccttccgagaaaaatattagataattttcatttcaaagtctaatagtccctgtggctgacattatttccaaggtctcatctcaatattatatgctacaggataaatttattacttttgttctttccttagtggacgtaataataattactactactttttgggcattacttctctgcttgtgatacggctctggcgagtagaggaacactagggctcttgtctcatgttcaattagataaaacaacatggacacacttggagtggttttaaggagcagagggtttaataggcaagaaaaaaggaagaagaaagaaggaagaagctcccctatacagagacagaggaaggggggctccaaagccaagagagggaaccccaagtgaagcagaaaccagccatgtgtatacagaggctggaggaggtggtgtctgatttgcacagggctcgggggattggtttgaccaggcatgtgattcacatagcctgggaaaaagctggccttcccaccctagccttttaatatgcaaatgcagggaaccatgatgttctacagaaattctctacagttctctacacacttggagatatgtgggggtggccatgttgccaggcacatgtggggcaagggcaagaaggcaactcctacaacacttgtaaatatacacgtaaatataataatgcacatgaaaattgttactaaactgtaaagtactattcaaaaatattaacattatttatggtagtattattagcataatatcatgttaccatatcattgatttttaagaactttggataataaaaataatgagaaagtctctctctctgtctctctctcactgtcttttggtgagcaatgcgactcttcccaatatcagaaactaaaatagaatttctttaactttccagctgagccccagaaaacctttcagcaaacaaacatgatggtttcatataccagttggcatgaagataaagtgttggtgctgcattttaaaggggaagtttgagaaatatgaggaaagtaactaaactagaatcaattataataggctggttatcggcaaatatacttttcagaggaacttggagcatctcaaagaaagccaggagtttagcagagtgttctacattctctttctactgtgatagacatgggcctaaacttttcatgcctctttttcattacctgtgaaactggggtcatagtagctttaccgttcttaagaacttgttataaaataccgtgtgtaccccagtgacttatggaaaaataaaataaaaaaattataaaatcacaagacaagggacttctaatgccttgttttcctcaaaaggaaacagtcttaagtgaataagtgatttgtcccaagtcagaaaacctagttgggctataataaactggaagctttttgaattggaatagatgttttagttatatagtatttaaatctttttactgaatcaggaattctctgcaatctctctggcattcattttgagatcactccttgttaagaaattgactgcatttcagggtggaacattatattattggaccactttaattgtctggcagtcattgtttttaatgtcatgtcaagttcctgtgacttctataccttgactcttatcacaagtgtgactccctagaaagcagacacttagaaattagcaagtttatcagggagtgcttttggtatccattctgtgtaaaggaagagaaaacaaataaataaacaaacaggatttgacagagaaagaagtcactctgtagtgcagtttgaatagagtgcctcagtggatgctgcagggaatttagatggaacaaactcttgagctgggatgacagagccaggcctttaaacctctctgtctatcacttactgaaagtaggctgccctgggaagggggcgtgaccttgggtgaaacagctttcttctgctgaggcaattcccaaatggggctgacatgctagggctgtttgtaggcagctaaagctttaattcctttatttctgaaaaataataaaggtgatacctcatagcattcaccacacataatacatttttagaattagtttgtaaatttctactaaaaatattcctgctgtctttaattgggattgtgttgtatctatagataaatttaggaagaatcgatatgttaacaatgttgaatcctcaatccattagtataattatttatttgagtcctctttaatttctatgggtaatattttgcagtttgcaatgtataagccacaaatacttttggatacatttgtgtcttgatgctattttgaatggaatattcaaatttccatttaaaaatatttatcactagtatatagaagtataattactgctttttatgcactggttttatcttctgaaatcttgttaagctcacttactagtcatagtagatttttaagtcaattccttagaattttctatgtccatgatcgtattgactatgaagaaagttttatttctttgtttccaatctgtatgccttttatttatttttattgccaggttgcaatggttagggcccatagtacaatatggaatagaagagccgagagcagacatcgttctgttgatcctagtctagttcaataacattcaatctttcattgagtatgatattagtagattatagtaggtgaattaaaattctagagtaacaacatgaaaaggatgcagtaagggtccattgcttagtaaagtcatacactgtctcaatttaactgcattaatactggatacaacagtagctggaacaagttgtaaataattatctactacctagctttgaaagagagcacattttacattcttatggaaacttttttttttttaatgatgaaacaaccaattctgtagcatatagaaaatgcataatgtcctgcaaaaataactgtgtagtggaaaattatctctttcagatattcatcacttactgttcactgattttcatgctgagaggttcatgcttagactactcttcaaacaagtttatctgggttgaagttttttgcctcgctccctttggacgggaggttgacattttcttattaaattcataaacatatcttctacttatataatattcaagagccagccatgactgcaggaaaatccatgagggtactcatggcctcattcttttaccacttcctctccatctcctcactgcttacataggagctcagcttcctcttaaaatccctttcagagaaccctggaaattttcaggatgttttgctcaggaaaaaggctgctcatgttgtactaattctggcttctcatttccgtctcttagttctgcttctgtgggagctgccctccctgaaaatgtgtgtttctgtagtggggtacgatccactgacgttcctgaaggaagagcagttctttaggtgcctgacttggtgaggactttgtcattgatgccttaaagcatcaatgrtcatgatgagagccttacgtagtctttcatgaagtcagctccttcacctgtcaccatcccatttttccctccacaggtgtcaygtagggaggagagaaggaaattccttggcatcccctttatcatctttaccatttctttgaccttgtccaaccagtcatatcacaaacaagcaaacaaccaagcaaaacccaaatattttcttcttttagtcaaaacacgaaaactaatatgaatattaattcatgcaaatgaaaacctgcaatgatcacccacaaaccagttacaaataaacaaatttggcctcagttggaaacctggctacacagcaatgcctccattgactagagtcagtcagttgcatgtttctattttgcaaaatcaatccaacaatcatttactgaaggctcatagagtattgctctgggggatattgaaatgaatatagataaaaagcaagaatgtaatcttcttaatgtcttctgtttagaatagcttctacttcacaaggcctttttgttttgtcattcattttcaaattaattaaaatacagctcattattttccaggcacaaatatttgctcactatatttaaacatataaatatttaaacacataaatgtccactgctaattgccaggcaattagcagtggacatttgactgcaaatggagtagagctgattgtaacattatatgcaaatgaggagtgctgaatctaatcatgcattgagatttccagacagtaaaaaattataccctctctaaaaacccaaagctttacattcaaaggtctacccaggaataaaggcagtaatggatgtcactacttgtagttatttactttaatcaccaatgccaaaaatgatatttagatgatgattgagaacattagcatcttgtaaatatcaaacatgattatttcctgtatggttcttgaacccctcactcttaagtcaaatattttcttgtgtatcatttttaataaatcagaacaacaagagctgaaatgaagacatcatcttatttaatcattttaaaaataaacacaatagttattactcttatactttataatagcctgagtataatcatacctacttctggagagacagattttcattcataagacagctttctgaaatcctcttctcatttatcaaactggaaggattggctaataaagcagtcaaaatttaaaaatatatatttagtttggttgaactctttgttttaatttaatgagctcatctagcttaaaacatatataaacatgaatatgtgtgtttcattcttccacagaattttggaagcaatacgggcgtaaaaggtttaattcatcatttctttgccacctcgattagaggttttaagcctattccttcaagctgcatgagtcatatcagaaaatatgagaaatcaacatcctgaaataacttgaattgagatttgtttaatggtgggatggagcagtatctcacaaagtgaaagctttttattaacactgaagaaaatacaaccatcatcaggcgagaagattataatggaggttgagaaggataactttggctgtggatgtttccacactgagaaaaaatgtctctgccctgatcagatgctagtgacctgctcatttcctgcatttgctatcaccaacacttcagtcctaatttcatatctactgattggtttcatatcctcctcccccttctcttcttgtcaaaattggagccacttttcaagacctagctcaggattttgctctgaaacccttcctgatcctcccggtttaatttaatcactccttcctcttcttcttaacagcacttcttatctgtaccggtcctttgaccctgaatcatatgctactttatatggttcattgcatttgcaagcctatttgtctgatcttagctagwttaaaaagsctttgagggcagaggctgtttgtttctgtgcttatactatctagtggctgtatagggggaaaaattacatgttgatgatcccaactaatccttttgctccaggatacgtggcttcctcaggacatgccatgcatatgtgaggtctattttaattcataacatcctagatatggctccagagtcagataaacctaaatttgaatctttgatccaccacttattaaatgggattttggggtacatttcttaatttctgtaagcatccatgtactcatctggaaataaagggaataataaaattgtgaggatgaaattagataatggctaacaatcacctggcatggttcctggccaataattagcacaaaatagtggcaattattattactatgggtgttgaagcatggtggaccctcaagtggctctggtagtcggggaggaggattgcttagagagtgcacagagtgctggactctatcagccagtcatcaaaatcgcagggccaaacacaatgcagtgagctcacacttaatgtagggcagtgtcaggagagaggcaaagtatgaatgagaatcatgccaacaagagtccctaatggtaataatactagaaattaggcatctggcaagtactgtttcgaggtggtcttttcagtttggttgaagacattgaacagcatctaagatttctcaaaacagaaccagtttttctgaaagggaggctagggaatgggtaggcagggttttaggtgctttgttgagtagatgagagtttgttttgtttcatgttaatgctttttcttccagcaactgcccaaagcccctcttcctcatgttggggctcagaagctgataccccaatacatggcgctttgacatgttgagttgaaggaaaagcctcaggtctctttgaccttcccctccactcccgatattctgtcttccccaaagcacagggtgaaattgttctctgargttccttgatctgcctaaagtctggaactgccaaagaataaaacaattacctctgttcccttccctgagtttgtattaattgaaatcacttttagggaagaaagattgaagtctgttaacacgcctggacagacttttgtcataaaccattgtcttctgcttcagtcccattcagtattatatagaaccatttaccagccattgtctgctctatgggyccaacagactttgtcccaggccattgtatattcttcaagcccattgaattcccctaaaaataatttactactccccccataaaatcatccatatttcctcatctcacattatcctaagaagaagggtagataaccacttgtaccccactgggtgttggggtgatcactctgtgatttctcccatgcatgttawtaagaatttatatgtcttttctagtattaatctgccttttgttgatttttttgcaaaactttggagggaaaaagggaagtttgcccttcacccctatacttttcttcttgtttgtagagtcactgactcattgttaccattttcttatctccattctcttaccaacccaatgcaatagagtttctcctacaggtcctctgaaatcactccagccaaggacattagtgtttttcttgtttctgactctatggattcattgtcatcttgtctctcaacagcatccaaatctatagaccactctgttattcctgagtttttctctgcttttgtctgctgtcagatcaaacataatcacttggtattcttttttggcttctcctactcactttccccaccaggttcctcttcctcctgtcaattaattgttaatattcctcacaattccctctttgtctctgttataactctacatcctctcctttagtgatgtctctgaccctaccaagtagtaagcactcagccgggcatggtggttcacacctgtaatcccagcactttcagaggctgaggtgggcagatcacttgaggtcaggagtttgagaccagcctggccaacatggcaaaaccccgtctctactaaaaatacaaaaattatttgggcatggcggcacatacctgtaatcccatctacttgggaggctgaggcaggagaattgcttgaacctgggaggtggaggttgcagtgagccaagatggcgccactrtattccagcctgggtgaaagagtgagtgagactctgacacacacacacacacacacacatacacacacacacacacacaaagtagtaagcactcaggagttcgataaccacctttatgttgatggcttctaaatctctgatatcagtccagatccttttcttgacctcaactacagggccaactaactactagatttctcaaacactattaagacagaactcttcacctctcccaggtctccaaatttattcttcctctcctgttccttctctcagggaatgacaccattatccattctgttgttattcaagtaaaacagactcacatccttcttgacatttcatttttttatatccaattaatcatcaaatttctactcaagcttcctkaccctgttttcctcttctgggtagataggtcttgtttgataattcatctgcaaatatatagactagagtgcttacttaaaaaccgctctcttgtttttcttttcatccacctgttaccacatagcttaatcagttttgccacatccctttcagtgtggacttagaaaatatacccccaaaaagcttcagtttcaattagctgggcgtgatagcacgygcctgtaatcccagctactcgggaggctgaggcatgagaattgcttaagcccagaggtggaggttgcagtgagccaagaatgggccactgcactctagcctgggcgacagagcgagactccgtctcaaaaaaaaaaaaaaaaaaaaagaaatgaatgygcatatgactaccatcctaatataaatggagcttatgccagtactatttgcagtagtactacttgaaataatgctcacaataaattttatgcttattaaatagtaattatacataatatagaaagtcaaatagtgctacaaaacttacaataacaacactcattaacttgacccccttccaaatctgatttttttacttctccaaggcaaccactttcaattcttttagttacactttcaacacttctattgttgtctccttatttctaaattaaatgcttatactgtgacttcttgattttaaactttaggtattatttattgacttcctgttttgagagttttgctttcttataccacwcctccccttgcctttcccccctgattaytcctctctccatcttcctaatagatttacatataatttctatttacgtttagaattttcattaccatgactatggctagagctgagccctgtagtgtactacatataataacatttttgttttactacaaatgcttttgcttttcctggagttaaaatgttcttattttaatgtgttttcttacatttctttttacctattactaaatcagtcatatgctttgcacaagcactataaaaatcttctcagtatggtcaggtttttttcttttttcttggcgaattcctcctagaaatctctatctgactactctaatcttaactggttacattctaagcctgctccacagctgttgttttagacacttatattcactcttttttggaaattccctttaccrctctccttggttctttgtaacattactggatttcctgaatactatttcttagattccatcttatttgttagagcacattctccaataatttcctgagaaaggggttaggggaaataatgttttgtagaaacttgcatgtctgaaactatgtattatattgtcacatttgattagctgttttgccagacattgagttttaaataaatttttttctgaaaatttaagccacttttccattattttctattttcagagttgatactgagaagtctattaatgcgtggatttctagtttctgtgtataatttatttttttctctctgaagctttcaggatctttctccttgatactctaaagttttgcaatgatgtaatatggcttgagtctttctaaattatttttctgggccctacttggatcatttaaatgtggaaactcacatccttcattttgaactatattcttctattatttattccagaattgtttctcctttttttttcttctcctgatcctttcattctattttctgggtgatttcctcattttattgtacaacttgtctattaaatttttgcatttgcttctatatttttaatttcaaagacctttttcttattcattcattcattcattcattcaacaatatttattgaataattatgatatgccagggactaagatagatgctggagatagacacaaacccctgcccttcagtatcttatcttctaatggttgaaggcaggtatgggattgcaagtaccaaaagatgggtgatatcaattttttgtttttttgtttttttttgagacagagtcttgttgttggctggggctggagtgcaatggcaggatctccattcattgcaacctctgcctcctgggttccaggaattctcctgcctcagcctcccgagtagctaagattacaggcatacgccaccatgcccggctaatttttgtatttttagtagagactgggtttcacccagtcaggctggtctggaactcctgacctcagctaatccatctgcctcagcatcccaaagtgctgggattacaggagtgagccaccatacccagctgatattacattttaaaaaggagagtctgggtaggcctcattgagaatgtttgatgatgcttgactgctcatcatatttacaaatgmggtatgaaaaagtaattggaagcactttgtaaatgtgtgcatgtgggggatggattgttttgtgaaccattgggccttaccatagattaattgagcatttaaccacttctttgggccctttgccttgaactgactgctttctccaggagaagctttattctcctgtctgaaacatatgtgccagactgccagcattctgragccaagtcactatgtagatcatctctctttttatttgagacaaggtctggctctgtcgcccaggctggagtgcagtggcatgatctcagctcactgcaacctctgcctcccaggccaatgcyatcctcccacctcagattcccaagtagctagggctccagccacgcaccatcatgcccagctaatttttatattttttgcagagacaggatttcaccatgttttccaggctggtctcaaacccgtgagctcaagtgatccacctgccttagcctcccaaagtgctgggattacaggcctgagccaccatgcccagtcaatatgtagatcacctcttagttatgctgtttcttgcagggactctacttgaacactcagttgtgattactgtccctgaggcaagagcctcttcagctttatttctcctgagattgaatccccagttttattccagaatagtgaagaggcagctatttgacagtctgggcttgggaagaagacacagatgtataactgatttttatacatatactgacatttgaacagtcttctttttgtcagctctgacccacacccattttgagagttatagtttcctggtggctctgctgtctgaactctctagggttctgaaccacgagaggcattacttccctctgacaaccaccatttcccccaaagctgatagtaggcttttagctttctcttttctgttagctactgctcatctacccacacttcatcttacaaaattttatcaacatctgtcacctactagtatctctgaactcatgtcttttgttttcctgggtttataccaatttcctttgcttttattttagtggagttttggaggaagacaagataaacctgccctatttaataagaagtccaaaataaaagacttaatccaaattacttgaaaacttttctgaatatatgaaataaaattttcattctcacaatgagaatagtctttcattctctatgaattctccaaataatttagtgattaagaaaacagatctattttcttaatatttcataarccttttggttacatactaaaacaatgtattaatattcttatacggtaatcatatttgagttggttcattagactttattttaacattatgagtaatttttttttttattagaaagtcttttgaattgtagggcataaggaatttttagttgtgactcctaggtctaacatttaaaaaaattcaaaacacactgtcttagcaatgttactagaattaatcaaacgctaaaattttgtaagcctgactccatagaccataaaatattggaaagatcacttgctatgaagtcaataaacttggaatttaatctcaactataccactggctacctgactttaaatgaaatgaacacttttgacctcaagttcctaatctttaaaatggggcttaaactagttggcctaataccaatattgaatgattatttgayagttacatagaaatagattggatgtagaaatagagatatgaattgcatggtgtttgctcactagaatgtggaaaactgtaaaggatgcatgaatatcaagcaaagagaaataagtcacataggttgcctgccattctttaatgcttattttctttcaattttttctttttaataatcttactaaagtgaagctggggctgttagtggtggcaaatccrtatgggyctgcagcaaccttacttcttgcctccttagaagaaagaattcaactgaggggcattaggcagagggagaaactgaggaaagttttagagcatgagtgaaagtttatttaaaagctttagagaagtaatgaaattcctttcattacttctcaagccggcgacttgagagatcaagtgcactgtttgccctttgacttggggttttgtatgttggcatgcttccaaggggttgcatcccttctccccgatttttcccttgggatgggcagtctacatgagcagtggcctgtcagcaattgggaggggagcatgcagtgtatgtactggtgttgtgcacatgctcacttgaggcattcttcctttaccagtctaatgttcctaggaggtcatctaccagttaaacttaccatttttgccttttagtgtacatgcttgagcccacttgcccaactcctgagatcttattgggaagctgctgatcacgagtttcatactttttcctatctattgggagactgcctttccttggtgccagttgtgaccaattattattttagagaggcagtttagccaccaccagaccatcacatcatagttgcctgacattcctggtgactggggggaccctcacctgctctggttatgtctgcctgactgactactgtaacagggccaggtcattttcttgcttaaacatcttactatagtccataggataaagatcatcactcctactcatgacatatgcacagccattgccagtggtttcaaaaggcttgcacatcacgaaggctcaataaatgttattgatttgaactgaacagtaaatagatcamgatggtataactgccttttagtgctcatagccaatgttctaaaacattctcctggtctatttttttgtctggctgccgtattgctatgatttctaaaaaaacccatagttttctggatcaggaagacactttactggtgggtcaggttatagagatcactgagaatgaagattttagtagtaaaatgatgtaaataatctaaatacaaacccttctactgctaaatcaattagagtcttttcccaatccttagagggaaaaaaagttaatagatttgctgaattttaactatttctctcctttatttttcatatcttttggatatttacttgattaccagggttcaagcaaatgattctcaatttgcttgaatcattgttttagatttattgtttagaataattgttttagattgtttatttcatgctgctttctgtgtgactgctctaggaacraagtcatgagtagaagccagggaggcatgaaagaaaaagtcttgtggcacccacaccgagaagatgctaagcagagatgtgaggaaacaaagctgagaattgagggacaatccaagggaaagaagtggactgggaaatsggttctcctggcctggaaaagacacgtcaccacagraaaaaatctggctccagagaacaatttattttaatatgcctcattttgctatttcattaattcagaaatacttggcctttttttctactgttactgtggaggcataataggaaatgtaaacatactggtacaaaataagaaataacttatttatatggcaggaagactagaaaaatcacagccattttcttcttcttactataagctctaattttccatgatactgctctacatacaggatctttatttaaaaaaacctgaagtgatgatattacattgccacatcaacatttgaaattaaatgatcaatgggtgatataaaaatggccagcacatggtacattttgtaatactttaagtcacattgttgagatccttgataaagatatgatttgcttttaatctggcaccatcatttattttgggcaaagctagaaaacaaataacataatttgcataatgaaaccattgagagaaaaatcactgtaatttgtcagaggtatctgcaccattttgacttacagtttaaattcattcaagtttatttctttccttaccccaactaaacaatgcttttgatttattcttgccatttagtgtcatataaaataaagtgttccactaggaggagaaataatttgtcaagtagaaactatattaaatgaaacattctctctgatatgtttttaatttgttttattcccattttgctattgcaattttcccacctgccaatggagataaggggctgtttcattctttctcttttggctcgcgaaggccacacgcttgttttgttaaggagagtccacctatcaccaggagggacagaagtcagctcaggaagggagaccctgccagggractcagccatgaggtaaggccagccatgagtccaaagacaagtattcctgagcacctgaccgctatttatcaaacattgttctaggggatgtggggaattgtaagagaagctcaagacagtgttcttgtctgggctgatgaaaccttatcctaattcaggctacagtgaatactttatgtgcaytctgagtgttcctatcctttccttgttatatggcaggagtttttgatatagggtacatggaccccaggaggcccttggatagaacacaagtggtaaaattccatcttttaaataattaactactaactgaaatttagccatttcttcaattatatatgttggcacaaaccacagtagtattaagagtgtctctgaccttgtcagcagtagaaaacactgatatttttatataatatcacagttgttgcagatatcttgraacatcatttgtgctttatcactatttttgaaaattatagtagttattagacctgcagctagagtttgttacttaatgcattcatatagaaagacatcattaaatcacatttttctggatacttttataattgtacttcaatgcaattggtgtcttttgtaatcctacgtattttctttcatacattcaaacactcatcggaggagtggcccacagaccttaacagttggccaaaggtgtcagcaatacaacaaaggtatcgaatccttatctatgatgatcagattaggtaatttctttattcacttatacttctaatagaaaaagaagagaaaaaatgaaaaaaagtaaaattaagggtttaatttcaaatgtttggtggggtggagttgttgaagtggttaacagcattgaggcttctgagttagtagaggcttaaaatttttcctttatatattcattatttctggtaattgagttattcagcatctgacctttaccgtcttgataatatttctgtctgttgtttcttgcgaaccttttctcgaatctgtcagcttgtgaccttggaaggttacttaacaccccctgccttacttttcatcattttctggttggagctaataatgcttcgtttgatgttgtatttttgtgtgtgagatcttttgtttgtaagatcttaaaagatattgacagtatttaattgaataagaatacatttgtaggcatttgaaactctaatgccttatataaatatatcaatgcaatgatttattattacagctgttatgccatagcatgttgggttgctgacaattttttatttttttttgtgacgaagttttgctcttgttgcccaggctggagtgcagtggcgtgatcttggcttactgcaacctctgcctcctgggttcaagtgattctcctgcctcagcctcccragtagctggaattataggtgcctgccaccatgcccagctaatttttgtattaatttttattattaattttatatttcaccatgttggccaggctggtctcgaactcctgacctcaggtgatccacccgccttggcctcccaaagtgacggtattacaggcgtgagccaccacacctggctgacaaatttgtatgtatgtatgtgtgtatgtatgtatgtgtttattatttttgagataggatcttgctctctcactcaggctgaagtgcagtgatgtgatcatggcccactgcagccttgacctcctgggctcaatccttccttctgcttcagcctcctgagtaacttggaaaattggcatgtgccactgtgcctgactaatttactttttgtagagacagggtctcactatgttgcccaggttggtctcaaactcctagcctcaagcaaccctcctgcctcagcctcccaaagtcttgagattacaggtgtgacccatcacacccaggcaacaatttttaaaaagaaactctaatccctcaactatatcattgttgggtaaggaataaaacataaataacgtcaaaagggggcaccttatgattatttctcatgggaacatggtgcttggaaatgttatacctctcaattttctaggatatgatgtgctgtcatcaattttttcttaaacatgcctctgacatggttaatagcacagtgcatttcctgagagttagggtggatggtggagtgaagggtcttgttaacatcatttggtgtacccatagtgatgctcccttgaccatagtttcttctcagtagttgaaggaattgcaatcatttccccttgcagagctaggaacatatgctggtagtgttaaggaacattttggtccacgcatcatcttcatttttgcagacagcatatttttaatataaccaagagtccaaaatatttcaacaagtaataaatgtaaacttttctaacaccttttattacatactgtggccaaaatacattgaagaagtagagtacaaattttgaaaagatggctgtaatgtgacacctctcctgtcatttaaatcaatattgcagctaatatatattaactttaggttgatggtgattaacccagcaccctccatgtgccaagtgttctatcctggcttttattagttactgcttaccaacatccattggtggtgctactgttcccatcttgatttgttttgagaaccttgaatatgagaaacagactctccaacctgctttctcttacaaaatcagcaggcttggggagcaatatttaaagaacacaaaaactttgatgcagacagtaaatatttccttctctccaagaaatttcatagccagcatccttatttctttgttagcatcaactgtggcattaatgtagcatccccagcctcacgtcagtgtttggagctcagttgaacaacagagtaggtggaatgggctgtgatttatgtgtatcaataagctcataggccccacccttgcttagtcaaaatcctataattagtaactgatatggttttgctgtgtccccacccaaatctcatcttgaattgtagctttcttattacctacgtgttgtgggagggacctggtgggaggtaattgaaccatggtggtgggtttttcccatgttgttctccttgatagtgaataagtctcatgagatctgatggttttataaagggtagtttccctgcacacattctcttgcctgccaccacctaagacgtgccttttttgctccttcgttttctgccatgattgtgaggcctccccagccatgtagaactgtgagtccattaagcctctttttctttataaattactcagtcttgggtatttcttcataaccgtatgaaaatggactaaaatagtaaccatctctggtgacgcctttattacagactttgcaattataagctattccttaagccacagaaagaaatgaagaaaggaagaggggaagacagaaagaaaacaattatcacttggtttagtgaccacgtgtgttgaggacaggtaaatgtttttattgtaaagccatctaagacccaggcattgggaatagggcatggttaataataattaacactagggaggcagctgacaactttggcatttagaggctcatagaaagaagaaagctcaaaatcatgtgttagcttaaaagagttgggttttagcctcccactgattctgcacaatttagtggcaagatttgaaaacaacaccaacaacactgctatctttgacattcatggaacaataaaaagtaaacacccagaaggtaacaagcctgggagatattaaccgagggatcccatggtttctcacttttccattcttccatgaagtcactgtttcacatagcttggagtctgtgaaccatgccaatatatgtgtctttttaacatggttcattttttaagtacatcattggtttggagagatgagaatgagaagatgagttaacttttattgtgaggcaccygtatggtttagactttcactgcaactttgttacaggtgagcgatatgcccttcatttcacagactctgtggggtgtccatcagcacatgagtaaagatcttcctttggagggtaaccactttctgacattaactgtgtcttgatggagaacacagcatatgagttatgagttttggcctgcgagttgtgaaagatgactcggaaaatatagccttggagaactaactcagaaaactcctctggcagcactaagccataaacagactcagctcatttctaattttggctcctcctcagatgtccaggatgacacaagccagccgtcaagcccatttctaattgctcctgttgcaatgtgttgacatctcttgtcttctttgtgaaaacgtgtgggatcatttagatgagagtagagataggaaaggaaaaggactagtttgaggcaacctctatgataatgaccagaaaggggagcaaactgaatggagtggagcaggaaggtagttgagaaagggtattagtagaaggaaagaatttggtgaaacatgacaatatttctgaagagctctagtagtaaacgcttgatgaatataggaaaaaaagaccatggtagaaaatccccacaatgcaatagagatggtaaaaaaagggaacagagcagaaaatatgaagtgtttaagattaagctaactaatagttctatgtcaatgctaatactcatgttgttctcccactatttgcatatctttctaggaatagaaaaaagaaggtacatgtctaagaaggatttaaaaatgtcaaggaaagaacaatgagatgagaaagattaaagtcagaggtgagcatcaggacttaaaaaattttttttcctgacaacaaggttattcataaaatggaaaatgccatcttaaatgctatgttacagaaataatgattgtgggatttacatatttagacccacaggctattagagctggaaagagcactaaaaatcatttagtctacttcttattttagagacaggacaaaaggcttggattgttattctcagggtcacaaaagcaattaacagccactcaggaacttaagtataggtattctggttcttagtctaggactaagaaccacagcaatttctttcctttctcataaatgtgatgattaaaaataaaggtcatgtagtttattgacttgcttgggggaaatcaacacattagaagcaaacacatgactagaacaagagtctcttgatttttggttcagagcataaatttgcttgacatgaaactatcaatggtttcatagattgagtttcctgaaatgacataaagattaatgagcaggaatcttattaggtaattctcttggaaacagtacttatagaatggaagaggaaggagcagaattgggaagaggggaaaagtgggctgtgatgcagtctaatcaaagtcataggtaatcccagaggaaagtctgagactggatggctcttggggattgtcatgagttggggcaaaggggtcagtccttcataaccctgagatcagtctttatttgctgcacccagggagaagccatgaccttgagcaargatgcgcttttcagccaggacacttaacaaagagggctgacagctgtcagcacttccagaagctggtaaaataagaccttcattcttaaagggacatcttggcagaataccaatgactattytagtccactgcttataccactcagatacacatcttcatatacatactgaaaatcaatcttctaggatcttagtaggtttcttttgctggcagaatgttgtaagattaaggttgataggataaactggtacccttgcagaaacagctagttgcaagatctcaaatgatatttatcatctctcttcttcactatccactttagattttcctcatcatctgctggtcttggtggcttcccagtggcatggtggtgaccatcctgagctcctggccaccctgtcctcttcaagccatagctgcacttgtccatttatcatcaaacgtaggcaaatagaccacatgggtgccaaacatatttcttcgtgctccccattgtatataagaatgctactttctttcagggttaattgctaccaccaagatggtgactctttttattttaagctggtcacttgctatgaggaacctgaaatgcccaggtgtcagccaaagcttatattacaactagaattttcctatgtttcctggtggaagcatttcytctttggcttgaacttcaagccatgcagctccaagagttgcaggtatgagaagcacaaatttcccaagtgggtcactgtgagtggtgataagtgggaccactcttgcttccatatatcagttcctggatccatgtattcaagcacctgggatacaataccatataaagatcattgatttagggtgtacagtgtatttgggaggttagagccccacattgacaatgtcatcttcaagctggcacttcagctgtgccttcaacgggccattccgttgctccctcagaccagcaaattttggtttgtgtggtatgtggatacaaatcagtgatccagtggtcagccaccagatacccactcttcaacctcctttcttcaatgtgaatctcttgatctgatgctgtatcatgtaggatcccacactggtgaaccaaacctctgtaagtcttcaagtagtagtgatggctgaagtgctatgggcagaaaagccaaacccatacctagaacatgtgtctattcctataaaaatgaattactgcctcttccaggatgaaaagtccaatcaccaagggactgtttggtctcctgtagagatggtgccattccagagaatttgtattggtctccgtctctagcagattgcatatttgattggaccagtcacttatcagcctcagtaagtggagggctatcctgctgatcctatgcaaaacttctaaccctgaaaatatagccattttatttatatgagtgttgtgctagcactagggaggctaatgagaaagacttgctgatgtgaactggccagctcatattgtctagcttgttatttcgtgcctcttccatggtaggtgctttctggtagatgttaacatttgatacaaaaatctttatatttcactcccattcctataggtccatgcaaatccctctacctcagaccgtatttttctgtcctttcaattttattttttcttaccccttaacctcccagtcaagccatttgccattgctcatgaacccatgcacattctaactacaggacacttccttttctatgtaaagagctcaccacatgcactgccacttgtcactgttgttaagggccacctcaatgtcaggctgtgatatagctttcatccatttcctgcttgcacacacataccaagccaacccatctctaaaccaattttttttttgtttttgaaawtgatacataataattatatgtgtttatggggcacatgtgatattttcatacatgcatgcaatgtgtaatgaccaaatcargatatccatcaccttaaacatttatcatttttttgtattggaaacattccaaattttctcttctaactattctcaaatatacaataaattatagttaagtatagttatcctactgtgctatcgaacactagaacctgtccttctaaatgtattttttgtacccattcatcaaccacttttcacgtcctctttcccaattttttccagcttctggcctatcattatgctctctagcttcatgagatcagcatttttaactcccacatatgtgtgagaacatttgatatttgcctttctgtgcctgggttattttatttaacataatgtcctccaggtcagtccatgtttctgcaaatgacagaattttattctttttatggctgaacaatactccattgtatatattccatttttttactgagcatattattataaatcttctttattttaaatttagcacattgtgctttaaaattatatccaagtaaaaccatatattcaactctttgttgtttctatacagaagtgtaaatacaacattactttttgtcactaagttgccttaataagttttacaggaagaaaaacattgaatgagaaaagatggcttaaattatatgtggcaggcctgtgaaaccatgcaatggatacggtatgtgtgtgtgtctatatatatacatatatatatattgatattattgatcttgagcatcttttcatatacctgttgcacatttgtctgtctccacatcctcatcaccatctgttattttttgtctttttgctaatagtcattttaactgtagtgaaatatctaattgtgttttgatttgcatttccctggtgactattgaacttgagcatcttttcatatacctgttgggcatttgtatgtcttctattgagaatgtttattcagatcctttgcccactttttagtcaaattattactatttgttgttgagttgtttgagttccttgtatattctatcaagctgttgcatcaagctatgcagaagcttttcagcttgatgtaatcccatttgtctatttttgcttttgttgcctgtgcttttgaggctttactcaaaaaaacccttgccaaaaccaatgtcctgaagcatgaaatttggatttttatcctcttctgtttgttggctagaagggattcccctctattttggtaggcataagatgatggtcaagagctataacatcaatagtggatgacttcaggacctaagctacctgctcatgttgtctgtttctgttaatgcttaatcctgaatgtgctacttttatctcaggatgttaaggtcctggacccaccctgaggtctgatattacccagctcaaaatgagcagttcaggcttcatggttacttggtgtccataatcagacactgcacttctaccaggacccagtagcaaaccaggacctgtttttcaaaagatgtatctgctgtagatggcacagctttactctacaaccctaggcatctgcattttgattctcccattgggctttcaacaaacaccacatggcaccttttcctaccatagattaatgctatgtcatactggtagtttatatcactcaagggaagggtcactggcaccacagtctgaatttctatagattcttttaatgctttggtcattacttaaagttagcagtctttcatgctacctgacatatgatttggtgctgtattcctgcaatggaatatgctgcctccagaacatgggaacgcctactaggcaaggtgcttccttatttgtgatagaaagtgcaaattgcaataatttktattttctttggaagggatatcccaaaatactcaaaaccataggacttctaaaaatattactaatatatcaggccctgaatctctatagagtttatctcttatcctctagtgtgtatatgttttacctaggcctacaatgtacttgtcacttcttttttctagttggttcaattgccatgacatcctagatatagtggactaatgaagttttctgtgatatcctagtcatcaagatctcttagactatatagcaactgaacagaagagttaacatagcccttggacaaggttgcaaatgtatactattgtccatttcaagtgaatgagagttctttctgattgcttttggtgtggttagaaaataatgtatttgaaggatgaatggtcacataccaggtgcctgaggttattgtcatatatactagcaaagatgccatatttgagctagtattgcttggttgagtttgtggtatccattgttattctccaggatacatctttttttttttttttttggtgggtgggggtgcggggggtgagtggttgaactaattgaattaattggagatacaatggggctcaccctcctccatccattaggtctttcattgaagccattaaatttctgccaaattccaggaagacctggaatatgacagtttattagagagtaccctggaaaaaatagccatgaaagtraaaaaaaggaagcaagcttggacagaagaaaaaactggactgaaatacaatctcagtgagtaccataactgatctctagagagctcttggtgtgcattggccctacagagctgtcctgagctaggtgaggagactggccttgatagtcttgtattgaccatttcccagatgcgtggtcaaggcagttctcttcaaccaaggcacttccaaaagaggttgatagctgaggactctgctggaagcagttccagcagctgggagaaaaggtctttcattcttaaagatgaatctggacagtgtgtccactaccaaatgaaatatgggatctcttatataatgtgataggaacctcaaaattggaatcatatattttattttttttcaaagtagaggctttcaggagcttttagtatatttgaaatgaaggataacaaaatagtaggtggggaagagaaaaagaaatggcctgccatactctaattatagaagagtacctctaactattagcatattgaacagacaccgaactcagaggagaatggtatttgtagactgataaatgagtctggaataaactacttcccagaaattgcctaaatgtagctcaggctagcgtaaactagtcaccccaggctggcttccttgtttcactgaaaaacaagtggcacttcatattatggaactaattgcaattggagtgtattccaatatattcttgagagccccaggtatacctgtgaattggaattcatccataatcagtaattatgctcttctatttaaatatttgatcttgggcaagattttatgcaattaaaggtatgagtttggtgtatattgttatacttaatgtcttattttatttaaaatatgaaaaaatgaatttaatcagaaatttcaaaaatgattccttatctgagaggccttctatgatgtcatttaaatagcaaattccttattattctctatctccttactcttttgtctttgcttttgtcactaatatataatatacagtatatttttaatggaatgactatatctcccatctctgtttggagtgtgtttcatgacagcacagaatttatctactttgtttattgcaatgttgctaacctctagaacatagtaagtgctcaaaagatggtgcctaaaaggatggaccaagtgttacacaagtcatattctatttggttaatacacttctccacttctgagaaacatattattgttaaagttaaggtagattaattatgttaagaataaatggtctgggcatggtggctcatgccctgtaatcccagcactttgggaggccgaggtgggtggatcacttgaaatcaggagtttgagaccagcctggccaacatggcaaaaccccgtctctactaaaaatacaaaaattagctgggcgtggcggtacacacctgtagtcccagctacttgggaggctgaggcgcgagaagcactcaaacctgggaagtggaggttgcagtgagcagatgttgcgccactgcactctagcytgggtartagagcgatactccatcaaaaaaaaaaaaaattaatggatgcttttggcaaattcaggactgaaaattgctgtgacttttcctccatgagagtttctgcagtttgggtcataagagttaaatatggttaatacttcattaagtactgtttaactttagcaacctaagacattacatgtcatcaattgttctgactttgtggcacctgatagctactatgctactgtggcattgatgatgttggcggtgatgatagcgatgatgattatgatgatgataatggtaatggtggtggtggtggtaatagcaggttaatattcactgagtggtttttcactaattgtcatgctgaattttgaattcactgacttatgtaatgctcactaagacattataaatacagtttaccattttaatgataagaaaactgagacatagagaatgtaatatccaacctggctggttgtggaaccagcatttgaagtggggtgagacttataccaaagactgcagatcttaactattctgatattctgagcagtggcaagcagagagaagggagagggaagtgataaaatttgaggaaaataaatcccacactccctttcaaaattgtgagtggagaataggagggaatgtttgagagcagtccagaaacatcatttaaaagcaggtaactataaggcagaaagaaaaatggcaacatcagagcataatacgaagattcatgggaaatgggagcagaggagaaggagacccagccttctggggaagacagtgtaggattagagaggaggctgtatttcagctgagactgaggaggggaggtaagacctaccagaaagaagtaccaccaatgtaaacatatcatcaraagtatgttgtgtaatgtatctaagcaatgtagtaaaaaagcgtagtggttaaactttactctcctaggatattgcggtatattttatatttgctatatatagtacatagtagtatacagaatatgtgtatatgtatatgttactacgtaatatacatatactactttccaaatagtatactgcagtacactgccaaaagtaatacaactgatgggcctaaaacaaaacacatttctttcaagggatttgtcaatcaaaaatagtgaaacaatagtaatgcttcattcctctcaacaacccacaatcctcatttctgtatatcctttacttacacagattcaccaactgtttacattttccacatttgttttatcatacatgtatatatataattattattatagctaaatcactaaaatgcttgagagtaagtttcagacttaaagactttaccacaaaatatctcactgtgcattttctaagaacaaggacattcttttatctagccaccatataactattaaacttgtacaatttagcattgataaaaattatctttgaacatacaatccatattcagattttaccaattatcccaataacattctttataacaatttctcctagtccaggatcaaagccagtatcacacattgcattgaattcatatcactttaatcttctttaatttagaagatttcctcagccatttttgcttttatacattaacattttgaagtgtataggccagttgttttgtaaaatgaaactcaatttggatttgcctatttcctcatgtaaattcaggtaggtagttttgcttaggaactatgtatgtgatttatgtcctctgtgacatcaatggtgtcacagatattggtgatgttaattttgatcactagattaaggtgttatctgtcaggattctccattgtaaacatgccattttccctttaaaaccaaataaactgtggggtgctaccactgaaagtatgtaagtaccccaagaaatcttcactcaatgatttcagcacccattaatgattcttgtctgaatccattatgactatatgattaaaaatttttgaatttttcattcaatcctttcatatattttagttagcatttctctcattgttttgtgagcaatttcttactttttggcacagtaaaatattccaggttccacttgtaatttctctctccatccgtggaatcagttgtttccttaaatagccctgcttcttttattggataatggtatcttgaaaccaagacttgggtgttggggtgtggctttttgctactagggtgttattgcacatataatgttccctcctcagccatggggcctacattccaaggtcttcagtagatgcctgaaaccacagatagtactgaacctgatgtaataagttggaacatgttcctgtttatgtttttttctccaacaaacttaatgccttttccatcttaattatgcatttatcatgcatggtgcccattacttttgcagtctgaggtgtgacagcaaaactggcatgaatttttttcctttttcacaatttcataggtagaagattcatattttactgtaaatcttgaaaacctcagcataagatttttcctttccttattaagttgagaacttacacattttcacttaaaggaagcacttaatggcttctctttcrcagatccaaattatcagcatcactactattgcattttggggctattattaagtgaaataagagtaacttgaatagaagcatagtgataacgcaacagcagatctgataactgagatggctcataagtgactcatgggcagagagtatactgggcaaaaggaggattcatgacctgagtgggatggagcaggatggtgtgagatttcatcatgctacttagagtgacatgcagtttaaaacttatgagttgcgtatttctggaattttgcacatattattcttgtactgccattgactgttggtaactgaagccacaaaaagtgaaactccagataagaggagaattctgtatatagatgatatgatttggccctgtgtccccacctaaatctcaccttgaattgtaataatccacatgtgtcatgggagggactgggtggaaggtaattgaatcatgggggtgggtttttcccgtgctgttctcttgatagtgaataagtcacatgagatcagatggttttgtaacggggacttcccctgaaatgccctcttgcctgccgccaagtaagatatccttttgctcttccttcatcttccgccatgattgtgaggcctccccagccatgtggaactgtgagtccattaaacctcttttctttataaattacccagtctcaggtatgtctttattagcagcatgggaacagactaatacaatgcatttgactactgcttaatgggacatttgttattgaacaacaaacaagtggaccttttaggtacatcattttgggagtagccatcagttattcaaagctaaaatctagttgaaatcatggttttaagaatccttattgtaactatgacaataaaagactgcatcatcttttaaaatcttcttgagattaacaatcaagtctcatgatcgattggttggtaacacagattctataaccatggatttttgagcttgtgttctttatccttttgatttgataagaatgctgaaactctgggaaggcatcaaagttaacattgccataacactagaaatatgtgaagaaatatagaagtaacgaagaaaataagtcaaatgtgttgttaatcttctagaacaagcttaagtctggctatagtaatatattttcaaaacattgtatttctgtatgttttgtctactaatgaaggtgttggaggcattcaaaggaatcattaaattcattctaaatcagtaagtctattctaaagtgtttaaagagatttaattaattaagtttataataagtgttaaaatatcaaagaaaaatgtattggaagttttactggcaaaaatttaataaatagagaattcaaaaatacagcaaagaatgagtgttttccatgcacaaaagctccctgatattaaaaagctgaggggtggatggatgggctttgaggtaggatctgggcagagcatcactgtatccactacaattgtcattttattttaccttccccttgtaaggtcaaataaaatgttagaatatatagattcatagactatcaactctgagagggaccttaaatatcacatactttattatggaacacttagcacagataaaaaaattcaaacactcactaagagtcacttcatcaaggtaccaaaacataggttaagctacttcactatgttttagatgctcacactgtatctttcttcacgacttcataataaagattaagcgttgtgttttggatagtccacgttgtgctgtaagtgtgctactaaattccataccagatactgcctctgagaagcttcagaagaagcaatgaattataaagaatgctaatgcgtagtaaccaggggttacaggtgggaacatcacaatcactacctaggacagctgaaattcctagaagcagggaattgaaccagggaccaaacaaggtccctatcagctctttagctctggactgaattgagaaagtattattgtttttaactggttcccatttggccttattaagagtttaattgtgcttttactctaaccttttatcctcttgacatttctttccttaattttataggtttttttgtctcccttcattataattttcttcttatattatactatatttccatctggaaaaagaagtctgtgtctgccactttgttagaaggaccagcagaaaaatattcttaagaatagaaattgcctttattagctgagttgatgaaagaattatatgaggcaattatttcccacatctctgagatcttggccatgaattttaacaataattgcttgcaagtgtattttcttttctattgtatttaacttgagaggaaagatacttctttacctctttgtttccccaataactggtataggtcctgacacatggtaaactctcaataaatgtttttaaatgaattaataattggtaacatgttataattgttcattcaaatatctacgtctttactagactgaatttaaagaatggaataaaatcttattaacctttgtactactactagttcctgcattaactgtttatgtagtaggtactcaatacattgcaatgaatgaaggaatgaaaaaagaaatgagatggactaggaggaactctgcatctttactttagggttgtggatgtaaaattatttttcttccattcctgtcattgatgtgggcaattccacagtattcttatgtactgcctgctgctaaaagagcctcttgatgaaataaatctagaatttagtaagaactcaaggtaatttttagaaatgcaattacttcttcacagggtgagagcactggctacctaaagtgaaaggaaatgattatggtaggcaaagaatactgaaaggagaaagctttgctactctcttaatgtttccctgggtcatccccaggtactatggaaagacattgagacagtctagcctagtgtgtaagtactaaaatcagaaagaaaagcatatgcaacagcatttctataggactaaagaggaaagcaagtgaaacaaggcaaatggacaaacgaaaagcttcaataattcatcaaagaaacaatcaaaaatagatttaagtgcttactgtgtcctaggaattgtgataggtactgtagatatagcaataactagcaaatgttttctctatgctaaagagtttcctaggttgtaggggagattgatattgaatgaataccctcatgaaaaatgatatgtttacagttgaaaaagtgatatgaaggaaaaaaaatctggttccatgttgcatataacaatggggctaccctaatctgaaaggtcagcaacaacattcctgaggaggcatcttataacactagagggacaaaaaaaggcattagtaatacagagagagaaggaaagctattctagatacaactgagagttcatgaaaagaccccaagacagaacaagcttgaggtttcttagaaccaaaagattgttatggttggagcttagtgagaaagggaaagaatggagcaaattacagtgggagaggaaaacaaaagcatcagataaattatgtaatgcctgaaggccaaggagctagggtcttattttaataggaagatattgactaatttaatagaatttatggaggtatatcacccaatttatatttttataaataatgaatgtggaaaatggcaaactaggaagctccaggctctccaactccctcagaaataccaagtaaacaacaacatacccatcaaggtagctctgtgagaactctagaaaccattaaggatctgcaacaactaacaaatgcataaccaagaaaaatccacaggcaaaatagtagaaattttgtggtactttttcagatttaactcactgtttccctgatgcagcaaggaagagaagccaaccaatgactgattattctttcgggataaaaaataaaaagagtaacgcttatttgcaacattctggctcatatagggggctggccaagggacttgtttctatcttgcctgacttgaaatattgacagaaattatggcagagtttggatgtcaagttgggagttgctgaaaacagtttagtcatgatggcatgagagggcttcaggataactgcagacccattggtgcctggggcaagagattacaggaagaggaatacagtagaacatctaaggccctgagaaggagcagaggtgagactcttctgggaatcaagattttaaaagcaagggaattggataaaaagcacatgcactggcccaggaaagatgaattccaggaaaaggcctgaggaaaccttaagcttttacaccgggccagtttgtgaaggtcttcccctgcatggagccagtttccaaagactatctatggtggctattttattcaaatgccaaattttcaacagtgtattataaagcatataaagaaacagagaaacatggcctcttcaaattaacaaagcaaatataccaaaactgacctgaaagaaacaggcttcagacttacttgacaaagattcaaaagcacctgtcttaaatatgctcaatgagataaaagaagtacaagggcaacaaactaaaggaagtcaggaaaataatatatgaaacaatgaggattttaacagatataaattatgaaaaagaaccaaacataaattcttgaactgaaaaatacaataactgaatttaaaaattcactagagggcttcaacagcagacttgactggatagaaaaaagaatcagcaaacatgaagctaggtcatttgaaagtaagaagtctgaggacaaaaaaaagggaagtatgaagaaaagtgaacagagcctaagagacttacggaataacagtaagtggaccaatatacatattacatgagtcctagaaagggaagagagagagagaaaggggaagaaagtttatttgaagaaataatagctgaaaaaaatatcaaatttgaggaaaaacatggaaatacttttcaagaggctcaatacattctaggataaaccaaaagagacccacactaagacacattaaaatgaaactggaaggtgaaagacaaagaatcttgaaagcaataagagaaaagctatttttcatgtacacaggatcctaaataagattatcagaagatttctccccagaaatcttggaggcttcaaagtagtggagtgacatatttaaagtgctggaaaaaaaatcctgtccactgaaaatttgatagttggcaaaaatccttcaaaaatgaggaacaaattaagacatttccagataaacaaaagctgaaagagttaaatgtcattatgcctgcctacaagaaatgctaaagaaagttcttcaatttggaatggaaggacactagacagaaactcaaaaccataggaaaacatacagtttccaagtaaaggtgaacacgtgaacaaatttaaaaactattgttgtaattatgatcaataactccacttttttgttttataggacttaaaaaacaaaataaaaaattataaatctatgttaatgaatacacaatatataaaggtttactttgtaacatcaacaaacaacataaagtggggggtaggcagagcaataaaggagtaccattttttctgtatttggttaaagttgtcattattttaaaatagattgttacaactttaggacattatataatccccatggtaatcacatagaaaaatatctatagaatatacacaaaaggaaatgagaaggaaatgaagacatatcattacaaaaaaatcaaacacaaaaaaagcagtaagggaggaaaagagggataacaaagccacaagatatatagatagcaaataacaaaatggtaatagtaaaaactttcatatcagtaattactttcaagtcatgtaaatagattacattccccagtcaagagacatagattggtagatgggcaggatggaaaaagaaatcaaactacccaactatatactgtgtacaagagcatatagttggaagtgaaagatttaaaaaaaacatatttcaagcaaacagtggccagaagagagcagaggtggctatactaatatcatacaaaatagactttaaataaaaaactattacaagagacaaagaaggacattgtagaatgataaaagggttaattcaccaagaagatataataatcataaacatttatgaatcaaacattagagctcctaaatacagaaataaaaagtggacagaattgaagggagaaattgacagtgctacaattttagtaataaacttcagtacccgacctttaataatgaatagaaaaatcaggcagatcaataaggaaatagagaacttgaacagcactatagacaaattggagccaatagatacagaacactacacccaacagcagcagaatacatattttctcaagtatgcatggaacattctctagaataaatcacatgttaaaatacaaaacaaggcttaataaattttaaaagattaaaatcacagaaagtatcttttttattacartggaatgaaactagaaatcaacagcagaaggaaaactggaaattctacaaatatgtgagttagacaacacgatattcaacaatgaatgggtcaaagtgaaatcacataggaaattgtaaaatatcttgaggcaaatgaaaataaaaacaccatgtgttgaaatgtgtggaatgtaagaaaaacagtgttaagacagaagtttacagttataaatgcttacattaaaaaatgcaaataaataacctgaatgtatacatatgtaactaacctgcacgttgtgcacatgtatcctaaaacttaaggtataattaaaaaaaagaaaaataaataaatattaaaattcaaaaaaaaaaaaaaagagaaaaaggaaaatagagagggaaaaagctaagatggctgactagatgcagccaggaaacatctatcccacaaagagaactcaaaatattgagtaaatcatcagacttcatacagatcttttgagagaaaacacttaaaatcaataaacacagagacactgaggttgaagagggaggaagctgggaagcctgcacagagtcatcgagtagcaggactggcttctggtcctgaacaggtcgcaaggaaggggtgagtgaaggaactttggggcaccacacccctgccatggacctctgggatcctagctacaagagagcccgtgaccccaacggacatttgaattggcagggggaagtgcctgaagagtaggcagaggtagagctcaaacctgcatggagcccagaaggttttgcagtgcacagggcagctacagcaaaatgcaaccataagttcccatccctcaagactctccgtctttccctgagtaagtgtagcccttgctgactgtcaggctgggagagaggagggctacctttctcatgggaccagggcacatctgatccacatgccgtcttttctgctggcctcatgctccttcaaaagggtacgtacagcacagcctctactaacccacctgagtgttttggcagcttcctgggagcagttcatatccccagcactgctggtgcttgaccccagggagcctgaagacaaaattgcaggatggtcccaaccccccagagttcaatcataccacccaagggtattgagctgaaatctgtggccagagctcaagcaggaaggagccccactctcaaaacacagagaagaatgaggcatgggttcctgtgtcagtgtgagtgctagatgttcctccctctgcaaaactggtctggrcaaggtgtagtctgttggccagccacagcttctgtttgagggagccctggaagagcccagtgatctgggcacagaaggttttggacgagtttagctgttcaggcctgctcctgtggcagacactggagggagacctggtagggagatggtgagctgggtggactccacagccatttgctgggctaaaagatcccagggcaagggcatcacaccaactgcacacctgtggcaccacagccctaccaagggatcctccacccttgacccactgcatcacgagaccaccaccagacatatcccacaacctggtgtgactctcccaaactcagaggactagcaggttcacagagagttgcaactgtccttgtgacctaatctttggcattggccacccctaatggagggccgagtgcagcctacaagggccccttttgggctaaggagatgtagatatggtgccagtgattgaagggggtttctccaaggtctgggaacagccttggtgagagggtcatctcttgccccatctccccctccccagagcactgctgcataatcgctgaaatacaaaagtggtccacagctcagtaagagcctatttgctggcccatattcttaagtgctatctactgtatcaaagcttgaattataccaccaaacaaaaataaatttcttcagcatagaaagcctgtgaaactcaaagcaggaaactagccacaactaaggaacccacacagaactttggccctctgaaagcacccagaaaagaagccaatagattatgcactagaagtaccacagtcargccggatgcagtggctcatgcctgtaatcccagcactttgggaggctgaggcaggcggatcatgaggtcaggagatcaagaccatcctggctaacatggtgaaaccccatctctactaagaatacaaaaaaattagccaggtgtggtggcaggtgcctgtagtccctgctactagggaggctgaggtaggagaatggcatgaatccaggaggtggagctttcagtgagccaagatcacgccaccacactccagcctgggcaacagagcgagacttctctctaaaaaaaaaaaaaacaaaaaaaaccacagtcaaatcctcaagggaaaaaatatagaaacaaaaagccccattcgcacaacagaaactacaaaaagaaaagtaaacaacagacccccagataaaatgtaatcagggaaagaactccagcaattcagagagtcagagtgttttcttacttctgaaggattgcaatagctccccagcaatggatcttaaccggattgaaatgtctgaaatgttagacatagaattcaaaatctggatggaaggaagctcaatgatattcaagagaaagttgaaatccaattcaagaaagccagtaaatgatccaaaaagatgacatggtcattttaagaaaggacaaaaatgaacttctggaattaaaaaattcactacagaaatttcaaaatgcaatttgaagcattaacaacagactagagcaaggtgaagaaagaatttcagagcttgaagaccaatcctttgaatcaaccaagtcagacaaaaataaataaagaaagaattaaaaaaaatgcagtctttaagaaatatgggataatgtaaagagactaaacctgtgagtcactagcattcctaattgagaaagagaataagcaatgtgaaaaatatatttgagaatacagtcaacgaaaatttcccaatctctctagagaggttgatatgcaaatctgagaaatacagagaaactgcaataggtattatacaagatgaccatctccaaggcacagtcatcattcttttcaaagtcattgttttttttctaagaaatccaagaaacacagagaaactgcattagatattttacaagatgaccatctccaaggatcataatcatgattctttccaaagtcaacacaaaagaataagcttaaaggcagctagaaattatggacaaatcacttacaaaagaaacccatctagctaagagaagccttctcggcagaaaacttacaaaccaggagagggtgggggcctatttttagtgttcttaatgtaaaagaaattccaacctagaattttgtaaatcactaaacaaagcttcataagcaaagaagaaatcaaatattttccagacaatcaattgctaaaggaatttgttaccactagaccagccttacaagatatctgtaagggagttctaaacatggaaacaaaagaacagtatctgctaccaaaaaaacacacctaagtacatagctcatagaacctgtcaagcaactacataattgagagtacaaagaaaacagctaccaacaccatgacaaaatcaaaacctcacatatcaatattaagcttgaatgtaaaacaactcagccatctgctgtcttcaagagactcttctcacatataatgacaccaaaaggctcaaaggaaaggaatggaggaagatctatcatgcaaatggaagacatagaagagcaggcatagctgctgtcatatcagataaaacagactttaaacgaacaatggtagaaaggacaaagaagagcattgcataatgttaaagggttcaattaaacaggaagacttaactatgctaaatataggtgcacccaacatgggagaaccaagattcattaaaaagtacttctagtcttatgaaaagacttagacagtcacacagaaatattgggggacttcaacactctgctggcagcattagaaagattgttgaggcagaaaattaacaaagatattctggatttaaacttgacacttgaccaattagcctaatagatacctacagaatactccacctaacagccacaaaatgtatattcttctaatctgcacagggaacatactacaagattaatcacatgccttgaccatgaagaaagtcttaataaattaaaaaagatgaaattataccaaccatagtcttgggccacagtagaataaaaatagaaatgaataccaagaagatacctcaaaaccaacattacatgtaaactaaacaacttgctctgaaatgacttctgggtaaacaacacaattaaggcagaaattaaaaaattctttgaaataaatgaaaatagagacatgccataccaaaacctctgggatgcagtaaaagcagtggtaagaggaaagtttataatgctaaacacttacatcaagaaattggaaagatctcacatgaacaatctaacatcacacctacagaaactagaaaaataagaacaatctacctcaaagatagcagaataaaagaataacaaaaatgagagcacaactgaatgaaattgacaccccaaaatccatacaattaacaaaccaaaaatgaattatttgacaggataaacaagaatgatagcctgctagccatattagcaaagataaaaggagatctaaataaacacaatcataaatgacaaagatgatgttacaactggtctctcagaaatacaaaagattatcagagactattatgaacagatctacggaaacaaactagaatatttagaggaaatggaaacattcctggaaaaatacaaccttccaagtttgaatcaggaaaaaattgaaacccagaataatgaattctgaaattgaatcagtaataaagaatctactaataaaaaagagccctgaccagatggattcacaaccaaattctaccagaagcacaaagaagagctggtaattctactgaaactattccaaaaaaaatcaaggaggagggattcttccctaactcattttacaaagtcagcattactctgataccaaaacctggagaagacacaatgaaaaaagaaaactataggccaatatcccagatgaaaatatatgctaaaatccttaaaaaattactagcaaactgaatccagctgtacatcaaagagataattcaccacagccaagtagactttattccttgtatgcaaggatagttgaacacacataaagaatacatgtcattcaccacataaacagaattaaaaacaaaaacatatgatcattttaatagatgcagaaaacgtttttgattaagtccaatacacctttattataaaaaccctcaagaaactaggcattgaagaaacatacctcaagataatgacatctctgataaacccagagtgaacatcatactgattgggcaaaagctggaagcattcttcctgagaaatggaacaagacaaggatgccctctctcactattccttttcagtataaaactggaaatcttttctggaatattcaggtaagagaaagaaataaaaggcatccaagtaggtaaagaaaaagtcaaactatctcccttcactgatgacatgattctatacctagaaaaccctaaagtctttgccaaaaaacttctagaactgataaaagagtttaagtaaagtttcagtatacagaatcaatgtacaaaaatcagtaacatttttatatatatcaacagtgttcaagctgagagacaaatgaagaatgcaatctcatttacaatagctataaaaataaaataaaataaaaaataaaataaaataaaataaaataaaatacatctgaccaaagcggtgagagatcggtacaaagataattaaaaaaacactaccaaaagaaatcagaaatgacacaartggaaaaacattccacattcaaggactggaagaatcagtattgttaaaatggacatagtgctcaaagcaatgtacagatacaatgctatcattggtagtttcctatcaaactaccaatgtcatttttcatagaattagaaaaagctattataaaatttgtctggaaaaaagagtccatatagccaaagcaatcctaagcaaaacaacaacaaaaataaacaaagctagaggcatcatattacctaattttaaactatactacaatgttactgtaagcataacaacatggtacttgtacaaaattgtacatatagaccaacggaacaaaatcaagaacctagaaataaagccgcacacctacaaccaactgatcttcaacaaagtcaacagaaataagcagtgggaaacaggctccctattcaataaatggtgctgtgataactggctagttatctggaccccaatttatcaccatatataaaaattaacccaaggtggattaaacacttagacctcaaagtataaaaattctagaagaaaacctaggatatatccttctggacgttggccttggcaaagaatttatgcctaagtcctcaaaagcaattttataaaaataaaaataaaaatcaataagtgagacctaattaaactaaagagcttctgcacagcaaaagaagctatcaatggaataaaaagataacctaaagaatgagagaaaatattcacaaactatgcatctgacaaagatctaatatccagaatttataaagaactaaaataattcaacaagtagaaacaaataatcccattttaaaaattgggcaaaagacataaagaaacacatctcagaagaagacatgcaaatatccaacagatatatcaaaaaatgctccacatcactaatcataagagaaatgaaatcaaaaccacagtgagataccgtattcatctgttctcatgttgctaataaagacataaccaagactgagtaatttataaaggaaaaaggtttagttgacccacagttcagcatggtttgggaggtctaaggaaacttagaatcatggccgaaggggaagcaaacatgtccttctttacatggcagcagcaagaattgctgagcaaaagggggaaataaaaccatcagatctcgtgagaactcactatcatgagaacagcatgaaggtaaccaccttcatgattaaattacctcccaccaggtgcctcccatgacatgtgggggttatgggaactataattcaagatgagatttgggtggggaagccaccaaacctcatcaaacagtatctcacaccagtcagaatagctattattgaaaagtccaaaacaataaatactggtgaagctgcagagaaaagagaacccttatgcacaattggtgggaatgtaaattagttcaaccattgttgggagcagtttggacttttctcaaagaactaaaatagagctaccattagacccagcaatcccattactgagtatataccaaaagagaaataaatggttctacccaaaagatagatgcactcatatgttcattgcagcactattcacaatagcaaagatatggaatcaacctaggtgcccatcaacaggattggataaataatatatggtacatatacaccatggactactgtacatccataagaaagaatgaaatcttgtcctttgtgttattatggatgcagctgggggccattatgctaagtgaattaacacagaaacaaaccaaatactgtacgttctcacttataagcaggagctaagcattgggtacttatggacataaagatgggaataatagacactagaggagggagaaaggtagaagggcaaaggctgaaaaactatctgttgtatactatgcttactatctgtgtgacaggatcaatcatacaccaaacctgagcatcatgcaatatacctatgtagcaaacctgtatgtgtacccccaaatctaaaataaaagtaaaaacaaaggaaaatagaaaaagataaacaacacagattagaagaaaatagaaaaagcatacagaaaattaatgaaatcaagagttgtttcttccaaaaggtcaacaaaattgacaaacaaaactttagctagattgactaaggaaaaaggagatactattcagatagctaaaattagaaatgaaagcaggaaccttccaaccaattttatggaaatgaaaatgattgtaagtattatgaaaaaggataacctagataaaatggatatattcctagaaaaaacaattcatcaagtctgagtcttgaagcaataaaatctcaacggtgtataactattaaggagactgaattagcaacttaaaacctccccacaaagaaaaattcaggtgcatatggcttgactgctgaattctcacaaacactaaaaaaaaaactaacatctgtctccctcaaactcttccaagaaacatataagtaggaaacactttcaaacttattctatgagaccaacattaccctgaggtcaaagccagaaaaaaacattgcaagaccaatatccctgatgaatattgatccaaaaatcctcaacaaaataatagcaaaccaaattcaacagtacattaaaaggtttcaacacctatgttcaaaatatgaatattgatcaatgtaatataccatattaacagaatgaagaaaaaactcacataattctctcaattgatgagaagaaacatttgacaaaattaacacacttttcatgataataacatgcaacaaactaggaataagaggaaactacctcaacctaataaagaccatatatgaaaagcccataactaatattatactcactgttgaaagattgggggggtgaagccaagatggccaaataggaactgctccagtctacagctcccagtgtgagcgatgcagaagacaggtgatttctgcatttccaattgaggtactgggttcatctcactggggagtgtaggaaagtgggtgcaggacagtgggtgcagtgcaccgtgcatgagctgaagcagggtaaggcatcacctcwcccaggaagtgcaaggggtcagggaattccctttcctagtcaaagaaaggggtgacagacggcacctggaaaatcaggtcactcccaccctaatactgtgcttttccaatgggcttaacaaatggcacaccaggagattatatcctgcacatgactcggagggtcctatgcccacagagcctcgctcattgctagcacagcagtctgagatcaaactgcaaggtggcagtgaggctgggggagcggtgcccaccattgcctaggcttgagtaggtaaacagagtggcctggaagctcaaactgggtggagcccaccacagcttgaggaggtctgcctgcctctgtaggctccacctctgggggcagggcacagaaaaacaaaagacagcaataacctctgcagacttaaatgtccctatctgacagctttgaagagagtagtggttctcccagcatgcagcttgagatctgagaacaggcagactgcctcctcaagtgcatccctgacccccgagtagcctaactgggaggcaccgcccagtaggggtggactgacacctcacatggccgggtactcctctgagacaaaacttccagaggaacgatcaggcagcagcatttgtggttcaccaatatctgctgttctgcagccaccgctgctgatacccaggaaaacagggtttggagtggacctccagtaaactccaacagacctgcagctgagggtcctgactgttagaaggaaaactaacaaacaggaaggaaatccacaccaaaaacctatccagccagagagaaaggtcgagttatctacaaagggaagcccatcagactgacagcagatctctcggcagaaatctagaagccagaagagagtgggggccaatattcaacattcttaaagaaaagaattttcaacccagaatttcatgtccagccaaattaagtttcataagtgaaggagaaataaaatcctttccagacaagcaaatgctgagagattttgtcaccaccaggcctgccctacaagagctcctgaaggaagcactaaacatggaaaggaactactggtaccagccactgcaaaaacatgacaaactgtaaagaccattgatgctaggaagaaactgcatcaactaacgagcaaaatagccagctaacatcataatgacaggatcaaattcacacataacaatattaaacttaaatgtaaatgggctaagtgtgccaattaaaagacacagactggcaaattgaataaagagtcaagacccatcagtgtgctgtactcaggagactcgtctcacgtgcagagacacacataggctcaaaataaagggatggaggaagatctaccaagcaaatggaaaacaaaaaaaaggcaggggttgcaattctagtctctgataaaacagactttaaaccaatacagatcaaaagagacaaagaaggccattacataatggtaaagggatcaattcaacaagaagagctaactatcttaaatatgcacccaatacaggagcacccagattcataaagcaagtccttagagacctacaaagagacttagactcccacacaataataatgggagactttaacaccccactgtcaacattagacagatcaatgagacagaaagttaacaaggatatccaggatttgaactcagctctgcaccaaacagacctaatagatatctacagaactctccaccccaaatcaacagaatatacattcttttcagcaccgcaccacacctattccaaaattgaccacatagttggaagtaaagcactcctcagcaaatgtaaaagaacagaaattataacaaactgtctctctgaycacagtgcaatgaaactagaactcaggagtaagaaactcactcaaaaccgctcaactacatggaaactgaacaacctgctcctgaatgactactgggtacataacgaaatgaaggcagaaataaagatgttctttgaaaccaacgagaacaaagacacaacataccagaatctctgggacacattcaaagcagtgtggagagggaaatttatagcactaaatgcccacaagagaaagcaggaaagatccaaaattgacaccctaacatcacaattaaaagaactagagaagcaagagcaaacacattcagaagctagcagaaggcaagaaataactaagatcagagcagaactgaaggaaatagggacacaaaatcccttcaaaaaatcaatgaatccaggagctggttttttgaaaagatcaacaaaatggatagactgctagcaagactaataaagaagaaaagatagaagaatcaaacagacgcagtaaaaaatgacaaagggtatatcaccaccgaacccacagaaatgcaacgtaccatcagagaatactattaacacctctatgcaaataaactggaaaatctagaagaaatggatcaattcctcaacacatacaccctcccaagactaaaccaggaagaagttgaatctctgaatagaccaataacaggctctgaaattgaggcaataattaatagcttaccaactaaaaaaagtccaggaccagatggattcacagccgaattctaccagaggtacaaggaggagctggtgccattccttctgaaactattccaatcaatagaaaaagaggaaatcccccctaactcattttatgaggccagcatcatcctgataccaaagcctggcagagacacaaccaaaaaagagaattttagaccaatattcttgatgaacattgatgcaaaaatcctcaataaaatactggcaaaccgaatacagcaacacataaaaagcttatccaccatgatcaagtgggcttcatccctgggatgcaaggctggttcaacatacgaaaatcaataaatgtaatccagcatacaaacagaaccaaagacaaaaaccacatgattatctcaatagatgcagaaaagtcctttgacaaaattcaacaacacttcatgctaaaaactctcgataaattagttattgatgggaygtatctcaaaataataagagctatctatgacaaacccacagccaatatcatactgaatggacaaaaactggaaacattccctttgaaaactggcacaagacagggatgccctctctcaccactcctattcagcatagtgttggaagttctggccagggcaatcaggcaggagaaggaaataaagggcattcaatgaggaaaagaggaagtcaaattgtccctgtttgcagatgacatgattgtatatctagaaaaccccattgtctcagcccaaaatctccttaagctgatatgcaacttcagcaaagtctcaggatacaaaatcaatgtgcaaaaatcacaagcattcttatacaccaataacagacaaacagagagccaaatcatgaatgaactcccattcacaattgcttcaaagagaataaaatacctaggaatccaacttacaagggatgtgaaggacctcttcaaggagaactacaaaccactgctcaatgaaataaaagaggatacaaacaaatggaagaacattccatgctcatgggtaggaagagtcaatatcatgaaaatggccatactgcccaaggtagtttatagattcaatgcgatccccatcaagctaccaatgactttcttcacgaattggaaaaaaactactttaaagttcatatggaacctaaaaagagcccgcattgccaactcaatcctaagccaaaagaacaaagctggaggcatcacactacctgacttcaaactatactacaaggctacagtatccaaaacagcatggtactggtaccaaaacagagatatagaccaatggaacagaacagaaccctcagaaataatgccgtacatctacaatcatctgatctttgacaaacctgagaaaaacaagcaatggggaaaggattccctatttaataaatggtgctgggaaaactggctagccataygtagaaagctgaaactggatcccttccttacaccttacacaaaaattaattcaagatggattaaagacttacatgttagacctaaaaccataaaaaccgtagaagaaaacctaggcattaccattcaggacataggcatgggcaagcacttcttgtctaaaacaccaaaagcaatggcaacaaaagccaaaattgcaaatgggatctaattaaagtaaagagcttctgcacagcaaaagaaaccaccatcagagtgaacagacaacctacagaatgggagaaaatttttgccacctactcatctgacaaagggctaatatccagaatctacaatgaactcaaacaaatttacaagaaacaaacaaacaaccccattcaaaaaggatatgaacagacacttctcaaaagaagacatttatgcagccaaaaaacacatgaaaaaatgctcatcatcactggccatcagagaaatgcaaatcaaagccacaatgtgataccatctcacaccagtagaatggcgatcattaaaaagtcaggaaacaacaggtgctggagacgatgtggagaaataggaacacttttacactgttggtgggactgtaaactagttcaagcattgtggaagacagtgtggcgattcctcagggatctagaactagaaatgccatttgacccagccatcccattactgggcatatacccaaaggattgtgaatcatgctgctataaagacacatgcacatgtatctttattttggcactattcacagttacaaagacttggaaccagcccaaatgtccagcaatgatagactggattaagaaaatgtggcacacatataccatggaatactttgcagccacaaaaatcgatgagttcatgtcctttgtagggacatggatgaagctggaagccatcattctcagcaaattatcgcaaggacaaaaaaccaaacaccacatgttctcactcatagatggaaattgaacaatgagaacacatggacacaggaaggggaacatcacacaccagggactgtagtggggttgggggaggggggagggatagcattgggagatatacctaatgttaaatgaggagatgatgggtacagcacaccaacatggcacatgtatacatatgtaacaaacctgcacattgtgcacatgtaccctaaaacttaaagtataatactaataaaaaaagaaagattgtaatcttttcctttaagattatgaacaagataaaatggtgagaggtgcccctgtcaccatttctattcaccacagtacttgaagtcctaatcagagcattagacaagaaaatgatataaaagacattcagttgttctctgtctttgcagattacatgatcatatatgtggaaaaccctgaagattaacatacatacacagaaacctcttagaactattaaatgaattcagcaaagttgcaggatacaaaatcagcacaccaaaattattttgttttttatacactggcaatgaacaactttgaaaggaaattaagaaaacaaattccatttaaaatagcattgggaataataaaatacatattaattaacttagccatggagatgaaaggcttatacctgaaaattacaaaatattgctgaaaacaaataaatgggaaatcatcctatgtttgtggattggaagacatattactgttaagatgttgatactacctagggtagtctacagattcagtgcaatccatatcaaaaccccaaaacatttttgcaggaatagagacaacctgttgagttagagaaaatatttgcaaactactcatccaacaagggactaatatccagactatacaaggactcaaacaactcaacacttaaaaaaacacaaagaatcccattaaaaagttggcaaaggacatgaacagacatttctcaaaagaaaacatacaaatgaccaacaggtatacaaagcagtggtcatcatgactaagcatcagggaagtgtaaaccaataccacagtgagataccatcttaccctagttagaatggctattactaaaaagacaagcaacagatgctgggaatgatgcagagaaaaggaaactcttacacactgttggtttgaatgtaaattagcacagccattatgaaaaactgtatggagatttttttcaaaaatctaaaaatggaattaccatatgatccaacaakcccactaccaaatatttatccaaaggaaaagaaatcagtatgtcaaagacatacctgcacttggacgtttattgcagcactattcataacagcaaaggtatggggtcaacctaaatgtccatcattgaatggatggataaagaaaatttggtatgtacacacacacacacacacacacacacacacacacacacatacacagtggaatactatctagccacagaaaagaatgaaattatgtcatttgcagcaacatggatgaattaataaagtgaaaagacaaaaaaggaaagaaaaacctatcctaaaatttatatggaatcttataggatctgaataatcaaaataatcttgaaaaggaagaagaaagtatgagttatcccactttctgctatcaaaacttatttacaaagctctagtattcaaaacagagtggcataaagatagataaataaaccaagagggtagaagagagggaccagaaataatctctcatatatgttatcaagggtgccaagagcattcaatccggtaaacgacagtgtttttcaacaaatggtcgtagtggtgggggtactggatatccacgtacaaaagaataaaatttgattcttgccttataccatatgcaaaaattaaataaaaatggatccaagttctaaatgtaagacctagaactaaaaatcttttaaaagaaaacaggagaaaagcattatgacattggatttggcaatgatttcttgaataggacacccaaagcacagacaacaaaagaaaaaaaatagataaaaaaactacatcaaaattaaaaactgtgcatcaaaggaacattcaacagggtgcaaaggtgcaaaagcaacacacagaatgggtgaaaatatttgcaaatcacatatccgattggggttaatatccagaatatataaaataagtcctataactcaacagcaaaaaacaacccaattcaaaaatgggcaaaatacttgaatagatatttctttaaagaagatattcatgtccagcaagcacatgaaaagatgttcaacatgactaacattagggaaatgcaaatcaaaaccgcaatgagacagcacctcacactcattaggttggctgctattcaaaacaaacaagcaaaacaaacaaaactgagcagaaaataaaaagtgttggctagcatgtggagaaattagaacccttgttcactgttggtgggagtgtaaaatggtacagctgctatggaaaacagtatggtggttcctcaaaaaatgagaaaatgattactatgtgattcagcaagtccacttctgggtatataccccaaagaattgaaagtagggtctcgaggagatagttgaacacctatgttcatattaacattattgrcaatagctaaaaggtgaaagcaacctaaatgtccattgatggatgaatggataaacaaaatgtggcatatgcctatgatggaatattattcagccttagaaaggaaggaaattctgacacatgctacaaatatgggtgaaccttaaggacagtatgccaggtgaaattggccagtcagaaacagaaatactgtatgactctacttatatgaggtacccagagtactgaaatatagagacagaaagtagaatggtggtttccaggggctggagggaaggggaatgggcagttagtgtttaatgagtacagagtttcagttttgcaagatgatgagttctgaagatggatggtagtgctggttgcacaatattaatgtactcagtaccacttaactgtacacttaaaaataattaaggtggtgatatggtttgactgtgtccccacccaaagctcatcttaaactgtagctcccataattcccacgtgtcataggagggacctggtggaaggtaattgaatcatggggttgggtcttttccatgctgttctcatgattgtgaataagtctcatgaaatctaatggttttataaaagggagttcccctgcacacactctcttgcctgctgccatgtaagacatgacttgactcctcctttggtttccggcatgattgtgaggccttctcagccatgtggaactatgaatccactaaacctctttttctttataaattacccagtcttgggtatgcctttattagcagcgtgaaaatggaataatacaggtggtaaatttcatgttatgtgcattttaccacaattaaaaataataaaaagatgatcatgggcttctagttcaattattccatttcttctccaaattataatcttaccaaaggaaaaaaaaacaaatgagatttaaactgccaagaacaagggcaaggtgagggtctttgggccttataattgatgaatatcttgccaaagtaacattacttagagtttcaaattgctgaacgatgaccaataaatttgagaggaggagggggatgaaagagcacagtgtcagggagctagttcttctatgttttatggaaggatgttaatagattttccttcaaattaataaaattaggacaagtagtatatattttaattgagataactgtagaagaactaaaacgtatttgatcaaaagtgataatttcagcaagctaacctgggatagtagaaatagattaggaaggcctaaattttcatattgtactctttattatcatttaaagcattttttatgcacatacattgctttagttttaataattctaaaattctcacataatatagcagagtataatgagaaatataataaacaccttttttcttaatagctagatttttcaaatcataacattttaccatctgtgcttcagatatttgctaagaaacaatatattacagatacatttgaagtttctacctaataattcctctccttccccaggggaggttggtgttttttatattatatttatgatacacacacattttaaatcaatatatgtatcatatataatacaaatggtaaagcactaaatattttttccatattttaaaatttatgtaaatagcattatactttctatattctgcaattttcttttattgctcagtgttctgtttgagaggagtggttttgaggccttgaagtaaaaattatgatttattgcttttgttatttatttatggggataaataattatgtgataatataatccataagtattactgctatgtaacttgtatagataacattttataatcaaagacatttacaaactttgtatcaaaatgataattggagtcctgtttagagaacaaactaaaaaactttggcagaaaggagaagcctgttttttgagaaatgattttgtttttgctttaaattggataagtttttctggaccatagctaatgtcaattttcataataatatactggttgcataatccatttgccagtttgtcttggctgaagaagttactgaaggtgaataaaattgtaagtttttctctccttgggaacagtttctgagttattgagagaaaaggagcccaagtaccttagtgaatgggtcccggtgaccccacacaaagttgtaggagctgagctttcattagaaatagtgtttgtcccagaatattctatgcgccattttatttagtttcttctacagtcctcagaaatagacattattttctcattattcaaatgaggtaattagagcacagaggtttgcaaatcacccaaggtcacccaggtacatggtagaattgggacttaaagccagttcttttttcctccagtgttctttctattcctgccaatgcagataaacctttgaaaaaatgtaaaagtctgacttgggaaaaggaatttagtttattttactttccaatttctcagtctgattttcacaaagagagttttttgttgttgcttgtgaataggtttctatatatttttattggccctagctatgtgactcttctcaaagcctaaaaacctgaatgtattttcaaactgataatggtcacttctacccaacattatgagctttgtcaatacgttttcctcatcttctgtcatacatatgcatgcttattttattttttacatatttatttcttattttctccccccaaattcacctccctcattgtccaaattcaatacagctatggtattggcaatatctactttgccttcttatgatgtggtcatttgtatcaaatgagaaaacaaatgttgtttcaaagtatgatgagctatacaaatgaaagagatctagaaactgtatttcagtctgaagtttaatgttactctctcttatgccaggataggattaccagtgatgtcagtgaacagaaaaagagatacattttcccacagttttgttctttgaaaaactatgttttgttctctgtaaataaaggggaaagaatgattttatagataatgctttcatttgcatgtaagacagcaaaattcaacggaccaattacaatcatgcatttttattttggcaaacttttttcttgccatttaaaattcgtaaattttattgtatataacccagtaaagttgattttagaaatctctaaaagttaaaaaaaaacccaaagaatgtcactatttgcaaccacttaagatctaagtattaagcatctgtggctgctaacatcacaaaaagagagacaactagacactatgtgccttttgctgaaagatcgtaccactacctagggtcatacccaaaacagatacttgcctctgatcaatcatctggatccaacaacgaatttacaagttacatagcagccagaagatacatggaactactctatgggaattcaatcagccaaacccatatcgtgagaacatttatagaaaaacaaccttcatcaagtaaattttaaggataaaatagaagagatagagggcaagatagaagagatagagggaaaacttgcacattcaaagagatttaggtatctatcacattgaagagattataattcctcatcttgttgatgttcatgccttttgctgtctaatgttacagtacccctccaccataggaggggttacctgttctaccccttgacactgggctcagacactctcagcatttcctattattaacatcttatattagtatatggtagatttttgtgattagccaaatatttatatattattattaactaaagttcataattcactcagatttccttagtttttacctaatgtcccccctttttttgtcccagaattccatccaggaaaccacgttacatgtattcatcattttcttggactcttcttggctgtggcactttctcagactttccttgtttttgataaccttgatagttttgaggagtactggtcaggtattttgtagaacgtttcttaattgggatttgtttgacatttttctcattaaagtcagtataaggatttttgggaagaaggcctcatactatcaacatgacatcactgttgatgttgatcttgctcccctgactgaggtgatgtgggtcaggtttctccactcataagttactccccctctgcttttcctactgtactctttagaaagaaatcactatgcaaggctaacatttaaggagtagggagttatgctccctctgcttgaaggcagaatgtctatataaattctgcatgggagatttgtctgtttttccccattaatttattcaatcattgatttatattagtatggactcatagatatactttggattataattcaacactgatttattttgttgttcaaactcttccatctgatgatagtttattttgctgtgcagaagctctttagtttaattagatcccatttgtcagtttttgcttctgttgcgtttgcttttggcattttcatcatgaaatctttgcccatgcttatgtcctgaatgttattacttagattttcttctagagttttacatttaaattttgagttttacgttgaaggctttaatccaccttgagctgatttttataaatggtttaaggaagggatacagtttcaattttctgcatatggctactcatttctcccagtaccaattattaaatagggaattctttccccattgcttatttttgtcaggggttgtcaagatcagatggttgtaggtgtgtggtcttatttctgagttctctattctgatccattggtctatttgtctattcttgtaccagtaccatgctgttttggttactgtagctttgtagtatagcttgaagttgggtattgatgggtattgaagctgggtatgatgcctccagctttgttcttttgcttaggattgtcttggctattcgggctcttttttggttctgtatgaattttaaaatagttttcttctaattctgtgaagaatgccaatggtagtttcatggaaatagcattgaatgtataaattactttgggcagtatggctgttttcacaatatttgttctttctatccatgagcatggaatgtgttttccattcatttgtgtcctctctgatttctttaagcagtggcatgtagttctccttgaagaggtcctttgcttccctggttagctgtattcctaggtaaacacaatttgaattgataagagggatatcacactgactccacagaaatacaaactaccatcagagaatactataagtacctctatgtatataaactagaaaatctagaagaaatggatgaattcctggacacattcaccctcccaagactgaacaaggaagaaattgaattgctgaatagaccaataacaagttctaaaattgaggcagcactacctagtctaccaaccaataaaagcccaggatcagatggattcacagctgaattctattagaggtacaaagaagatgaggtaccatttctactgaaactattccaaaaaattgaaaggaagggaaccctccataactcattccatgaggccagcatcattctaataccaaacctggcagagatacaacaataacagcaacaacaacaaaaccttcaagccaatatccttgatgaacattgatgcaaatatcctcaattaaaaattggcaaaccaaatccagcagcatatcaaaaagttgttcatcacagtcaagttggcttcacccctgggatgcaaggttggttcaacatatgcaaatcaataaatgttattcatcacacaaacagaactaaaggcaaaaaccacatgtttttctcaatagatgcagaaaaggcctttgataaaacttaacatccctttatgttaaaaactctcaataaactaggtgttgaggaaacatacttcaaaatagtaacagccatatatgacaaacccacagccaatatcataccgaataagcaaaagctggaagcattttccttggaaactggcacaagacaaggatgccctctctcaccatttctattcaacatggtattggaagttctggccaggacaagcaggcaagagaaagaaataaagggtattcaaataggaactgtctctgtttgcagatgacataatcctatatctagaaaatcccattgtttcagccccaaagcttctaaagctgattagcaacttcagcaaagtcacagaacacaatgtcaatgtgcaaaaatcactagcattcctatacaccaacaataggcaagcagagagccaaatcctaaaagaacttcctttcacaattgctacaaaatcaataaacttaccaatttttttctctcatagattttgcttttggtgttgtgttaaaaacttatcaaactcaaggtcttgtagattttctcctgtttccttatagaaatttcacagttttacactttacacttaggtctacactctagataatttttgtaaaaggtataagacttgtatctggattaattttttcacatatggacattattttttcagcattattttataaaaaaaacttttctttctctattgaatttttttgacataactcagttgactttatttgtgtgtgtctttttctggggtctccgttctattcaattcatctatatatctattcttttgccaatacgatcctgccttgattatggtagctttgtagtaagtcctgaaattcagtagtatgtcatctaacttgttacatttctccagtattatgttggctattgtagacgttttgcccttccatatagacttcaggattagcttgctgatatctacaaaatagattcctaggaatttgattggattcccttggctctatagataaagttgggcaaaattgacatcttttttttttttttttttttttttttttgagacggagtctcgctctgtcacccaggctggagtgcagtggcgggatctcggctcactgcaagctccgcctcccgggttcacgccattctcctgcctcagcctcccgagtagctgggactacaggcgcccgccactacgcccggctaattttttgtatttttagtagagacagggtttcaccgttttagccgggatggtctcgatctcctgacctcgtgatccgcccgcctcggcctcccaaagtgctgggattacaggcgtgagccaccgcgcccggcccaaaattgacatcttgacagtattggatattccaatccatgaacataattttttttatcaatttatatattttttatattttcttttttcatcagagctttgtagttttctacttatacatattttgttagatttatccctgaatatttcttttcttttttttcctctctagttttggtgcagtggcaagtggtattgttttaaaatttcaaattccaattgttcattgatggtacgtaggaaagcaatttacttttaaatactgaccgtgtatcctggatccatttatttccaaatatatttagatttctctttagatttctttcatgactcatggcttattctaaagtatgctgtttaattctcaaatatctagggattttccagctatttttctgttattgatttctagcttaattccattgtggtctaaaaacatactttgtatgatttttattcttttacctatgttaatatgtgttttatggctcatgatgtagtctgtcttggtgaatgttctgagttttagaagattatgcattttgctgttattggatggaatattctataaatatcaattagatcaagttgattgataatgattgataattcagataatctatggtcttattgattttctctctacttttcctactaattactgaatagaagtgttgaagtctctaactataatggagtatttgtctaattatcctttcagttctttcagtttttgcctcacatgttttgatgctctgttgttaggtgaatatatcttcacaaagatattggagaactgactcctttatcattatgcagtgctcctttttactcctgcttattttatttgttttgaaatttgctttgtctgaccttaatatagctgccccagctttctattgatatatgtcagcattgtatattcttcttcatccctttacttttaatctgagtcttttaaaatttaaagtggactgcttatagacaacatagattgtatcttaatttcttatcaactctgaaaatctcttttatttggtgtatttagaccagtttgttacacttaaagtgatggttatttatatatttagacttacaggtaccgtgcttataaatgttttctatctgttgcatttattctttgtttcttctttcccctctttttctgccttctgtgtttttaactgggcattttatatgattccattttatcccttctcttagcatatcaattatacttttaaagagttcgagattgctctagagtttacaatatatgttttaactaatataagtctaacttcacataacagtatgccacttcatgtagactatagttgctttataatagaatattattccccattcttccctcctgcccatttcactgatctatatgctgaaattacttattatattgctatcattaaacagtcatctattagtccacttaagtataagaaaaataaaatattttgttttaccttaatttattctctcatttctctctctttccttgtagatccatgtttctgaaccacatgattctccttctgcctgaagaacttctttaaacttttcttactgtgtctgcaggtgatgaattacctcagtttttgtttgtcttataaagtgtttatttctctcctaattttgaagggtcattttgctagatatacaattctaagttggtggattctttttctttcaacactttaaatattcactccattcttttcattcaattcttttcttgcttgcatggtttctgagaagtccactgtaattcttatttttgttcctctacaggtaatatgttttttcctctggttacttttaaggttttctctgtttttggttttctgaagtttgaatatgataggtgcaggggtggttttttgaaggtgggggtgagggttgctatattagtccattttcacgctgctgataaagacatacctgagactgggcattttacaaaagaaagaggctcaaatggacttccagtttcacatggctggggaagcctcacaatcaagtgaaaggccaggaggagcaagtcacgtcttacatggatggcagcaggcaaagagagagcttatgcaggaaaactcccccttataataaccatcatatcttgtgagacttactatcatgagaacagcatgggaaagacctgcctccatgattcaattacctactaccaggtccctctcagagcatgtgggaattcaagatgaaatttgggtggggacacagccaaaccatatcagttacttatactatttggtgttctctgagctttctgggtctgtttcagtttctgtcattatttttggaaagttttcagccattattacatctaatatttcttctgcttcattttttccttcttctactgatgttacaccttttgaaattgtcccacagttcttggacgtcctgttttgttgggttcatttccctctttcttttttttctctttgcagttcagtttgagaagtttctattgccttatcatcaagctcactgattttttccttggctatgttcagcctactgatgacctcatcaagggaatcctttacttctattactatgtttttgatttctaacacctccttttgagtctttcttagagtttccacctatcttcttacattacgcatttttatatgttgtctatctttttctgttagagcccttaacatactaatcatagttattttaaattccccatctgataattccaacatctgtgtcacatctgagtctgactctgatgattggtttgtcttttcggactgtttttcttgtcttttggtattcctcatagcattgtattgaaagctagacattgtattgtatactaggggctgagataatatgtttttagtgagaaaatttatgttaatatgggtttaatatttgttgtagctatagctgccacagatttcagaaccattcagtgtccttgtttttgcctctatccttgagggattcctaaattctcttcttcagagaaagtcagtgtcttgtagctcttttgtatgtaatcaattattattatactggagctcgatggtttggtagtaaaaggtggggaggaatagcagtctatatataatgttaaaattacatctcagtgttttggtgaaggggaatggtctgtaccttttggctatgaccatcaacactgtcttcccagtggtacagctttttttttcttttctttctgctccctcctccctttcttggatgcagtcttcctagtccatttcgttgaagccctggctcctgttgattatttttttatctgaggtgagacaggaaagctagaagggcttggaatgggtggaatgaccgtccctcatgtaacataacctcaaaaaatgcctcttctcttaaatagtaggcctttattttaaagaaggctcaaagattacaattattcctctttccctctcccttcggaggcatgatgggatgattatctgttgggtttcctggagataaagctcctgaaaatttaggggtctgcctcagacctcagccatcaaggagtttctcatgctcatgttagttcacgctcagtctccagcaattcaccaaaataattacttaagtgttcctaccggatgatggctcaagaagcttaagtttcaggtaagcagatcttagctgtgcctctctgtaaatgcctgtctctctggatttgggggtattgatttatgctgaaacttcaatttccttatgggtccaagaaaagtcattgatttacaaatttttcttgctgtagacagaagtgataatatccaagccctttacatgcagctgaacctggaagtttctttgttttaaagttcttcatacaggtttcacacatgatttgctaagtttattcctatatacttactctccttgttgatattgcaaatgaggttttctctaccattataatctttaacaggtttgctcctttaaataaggttgctgatttcaccatattatttttatattctgcaacttcattgaattatttcatgggtaacgcttcttgtatcattgattctctaaagttttttaggcatactattaggtttgtgcaaaagtaaatgtggtttttactgttacttttaattggaaaaactgcaattacttttgcaccaaccaaatattattgcgagtagcaataattttactccttctttaccaattcttatacctttaattggtttctcttctttaattgcataggtaatacctctgatacaatggtgtatagtcataaggatggtggtcatccttgtcttgtttataatcttaatgaaaatggttctgatattttcccatttagtaagatattggcttaggatatctatctatctatcttatcatgctaagaaagaaattttaagtttcttttttttttagtgttttcaccaggaatcagtattgaatttcatcagaggatttttcattatctatggagatacataattttttttcttagatttaataatgtggattataataccaatrggttatctaatattggaccaactttgcattctgaaagaaattccacttagttgtgttgtattgatttcacaatgtataagattctgtttgctaatgttttagttggtatttttacatcaatatccataaacatactgctctgtaggtttttttttgtatttttaaaaatttagatttaggtattagtgtagtacttgcttcttaaaaattgggaactttttattcatctttaatgttctgcagcactctataaaacattggaaatatcaaatctttgatgattcggtagaatttttttccaaagttatctgggcaaggtgctttttkgttgatgtttttcttaataacttactttttatcttctatggaaaatgttgtctatctataactgagtcaaatatcatttattttattgccctaagaaattatccatttcctctgttttcaaacctatttgcatagaggtctgcaaaatagtcacgatattttaaatttttgtttcagtggttgtttccccttgtcatcttctatttttttattttataatttctcctctattttattaatttcttcaaacttacaggaatttgatttcaatggcaaaagatttatatcaaatcttaagagaaaccagagtataggaattcgattaataagtctactgtttttctatttttaattgattaatttctacttttatctaattttatgcttctttgtgctttctttttacttttttattgttttttgagctgggtttttaatttcttaatttcgttaaaaatttttaaatcagaaatatttagtttatttagttctgtgacttttcctctaaatactaatttcaatacatctttccattattatttttcagaaattttgtcatgtaagtttgtattttccctttaggtagaatgttttctaataaacattttttcttaaaatttgcgtggaagagtctttttgctctttaattctgttarcaatttctagtttttattgcattatgatatttattgttgtgatatttctactttttgaaacttactgatattttctttgtgacttaatatttgattatgttttgtaaatgttttattgcacttgagaagaggtgtattatttactgtatggctgtaagtttggtatatgcttataaagtttggtatatggttataaaatctaccctgttttacatgttgtctagatcttacaactctttagtattaagttgtgacttttagcattttcgttatatttaatttttttggattgaattctagtttggctgatagcagattacatttcctgatttcttattgtttccattgactttaatgttttgttcatctcttaattttagattttctgattcaccttgttttatgtatgttttttgtatgtagcatatagttacatcttgctctgtgtaccaaactgaaaatcctttccttttattaatagtttagcccatttttttacatttatatttagcccatttatatttatattgatatggttgcaatttttattttacactctgacacaatagtttatagttatgtatattttaagttatttgctatgtttctctttctccctctgcatgatgtgtcttttttgccttttaatatttttctaggtatgcttttgtttaccacaaaagtggccagcagggtaagaccatgagaaaacatgcatggggatttggtgtttattctttttgttacttacagttatcatgaagtttgggtattctctatgttcagcttatgctgagggcataatttgcatagtttcatttttcttattatttctctttattgcttttagttgtagacaggaacccagacagttgctatcttcctccatgacctagaattctggcttctagaaatcataagaatatttcccactgtagtctgacatgccaaatgtagctgtagcagtaattaaattggtggggggattttagtaattcggttgacagcttttgggaaatgacattggctggattaaagaccataggaaacccagaaagtttttatgctgctatactagtaaaactgccattaatgtggactgttcaaaatgctgaaagacatatggaacctcaactttctacaggcaagaagcaggctgagaaagtcgttcaaagggtatattttttcatgttctcttcaaaaatggccaaatagggtgatggaaaaagaagaattccaagaacatggagccaagggctgtggaaaacaactgactgaggagccactcccaggaagccaaactggggcattatcagaaaatattattcatcctaaaaatagacccgccatccagtgggattgtagaattgctatgtaccagtgagtacaatgtgcctcctctctttccctgtgtgaatggcagtgtttattgtgactattttgcctgatttcgcctgatttcaccactatatgatgattcgtcttttaattcataggcctctagatggggacgacccatatctatacttgtggtggagagtgtgttgttctgcctagatacccctcaggaatgaaggacttatgttctcatctgctgggagtgctcgtgaaagatagtccttagttgtcatccctcctttgggcttttccaatggcttatttcccaaggtcatatattcttacagggactgctctgattcacgttgggcatgaagttccagccctttatacccaaaattatgaggggccactctaagctgtagaatttcttttgggttacctggggctatcttggaactgaatcacagatcaacatctccatctgtctgatccttcttttactgttttctacaagtgtttgtctcaagagtactcccaaataattatagggcgtgctaatttctttctcaggttatacgttccaggaaacctaatctgcatcaagtcctgatatatgtctaccacaagttgctgaattttaaacttgatgctctgtgggatgagatgttttagggagtcttgtgagtgtcaccactcactaaatatatctcagcatgtatgtgggaatgaataattgtagtcatgagtaaagactatggtagatggtaaagatggctccattttttcactgctccctatattcatgtcttttgccatcttactttgcagtgttcctccattctgacacagtacatggccacgtaacttgctttttcctaggaggaagtagaagtggcagtgtgctaatacaaacctaagcctcagaatgtcttatatatttgctttttgttgttggctttagtttttttttggctgtttcatttctgcacttcagcctgctgggaactgggaaatagaaggaatatagccaagccatcaagatcatccaagctgaggccagcatcaaggagctggaagcctataaatgcagatatatgagcgagctctgctaacatcagtagtgctcccaactgactactccagacgtcgttagaacttactgctgtgtactactgtagttcattttgtggttgtttgttatgcagcattattatagtaatagagatgggatacaagggaagaaaaaactatgatgtgtgtggatgcccccttggtctataaaggtataaagatacctaggtgagtaaggtaaagatcagagtgtcagtaatattgaggagagaggaggactgtgtctggaacaaggcttatgaagagcggctcaagtggctgaaaaagttatatttcttaaactgggttgtgtttagaagggtggtaatcattcatttagctacacatttttaaatgtagattttctctacttattgtattttatggtgaaaaggttaaaataattttttaaaattacacaattcaaggctttaactttatagcaagagaaatatatatcctagagaggttaagaggaacaaatggaagttagcagcaggacaaggattagcatccagaccaaacattatgtgaataaatgagaaaaataatatcaataaaaggaagtgatattttcatagagaaggacacagaattggacgtagtggctgatatttgtaatctcagcagtttgggaggttgaggtgggaggatcacttgaggccaagagtttgagactagccygggccacatagtgagaccctgtctctacaaaaaaaatttttaaaaatagctgggtgtggtggcatacaactctagtcttagctacttgggtggctaagacatgaggattgcttgaacacaggaatttgaggttgtagtaggctgtgatcgtgccactgcacttcagcctgggcaacagaacaatatcttacatctacagaaagagagagagggaaggacagaaataatgagctatggaaaattgcacactaaaggtgttaaaatgtttttttatcaggggaggatacgaaatctttttctgaagttttcaagaaaatcatatttttgaaatgataaaatgtatccctgtcaagaggtgagagtttctattaggaaatggttgttaagcatcacaattccgtgtctccctatctaaacactttctatacccaccaagaagatagattcacatgatccatgtatgcaaaatcttattgacagaaatggactttgacctaggaaattttccatcctctctacccaggcttccagggacaccatgaatgattcttttagccttagatgatgtattcagaaccccctcttttacattataaatacatggctcacgttagaaaaattcttgtagtaagcataggttctaccagaacatgtatatcttatttgctaactgcaaattgtactctagacagttattaccagtggtgttctcaagtctgtctagtgaacgcctcaaatacattttattgacaaatgtcagaagttactgcacaaaattgtaaagccgtttggttctgcaatctgtaagattattcttcagtagaatcaaatattttacttaaattctcccctaccttctattacctttccatatatttttatattttgttagtatcagggttgaatgatatcaaacaggagtatctactaaaattattagtgattctaaataattagtgtgaatatgcaaattcagaaggttcagttggtatttttacagtttaccatgactcaggttaaacatcaacaggtgtggactcttagagtctatgtacctggtccatttgccctaggttaaaatgaaggaaacaactgatacccccaaaatgtggaaggacttgcccaagcttgttaggtgttcatccagacctggaaagaatctaccttatgataggccagtcctcttttcaatgtactagtcaggctctcattaactttgacagagaagatgagaaaatttatctttaccattaaaatggtgtcttaataaaaacggtgtgtttccagaatttctcttaggggaggtttggggagagaatatggcaatggaggtggcttaggtgcttgttttgaaattgcacttaaaagtaagataaggtttttacttagattgggggtggggtggggtggagtagcaaaatacctcttggcttctgcactgattaagactaattattattattattattgttacagggtcttactctgtttcccaggctgagtgcagtggcacaatcagggctcactgcagcctcaaactccccggctcaagcaattcttctgcctcaaccacctgagtagctgggactacaggtgtacaccaacacacccagctaatatttttattttttttgcagagacaaggtctcactatgttgtccaggctggtctcgaactcccagactcaagcagtcctcctgcctcagcctcccaaagtgctgggattataggcatgagtcaccatgcccaaccaagactrattatttttggaacctgttttaagatgtgttggcattctcaatcaggtttagaatagttgtatagactatacacgaagattcaaaacatttcttaaaatattctatttttagccagtttgcatttaagtactttaaaaagggggcatttcatcagagacaatgctaggtatatttaccttactatatccatggctctatgttttctaacactgtgtaatttactcttttctaatagtatagaaggaggctatgactcttaagtaggcagtttgagaaaagaaaatatctaaaagctgctctttagggataaactgataataacaacaaagtgttattaaagaaactcaaagaagttacatatacacctgctttttttttctttttcttttctttcttttttctttctttcttttttttttttattttttttttatttgagatggagtctcgctctgttgccaggctggaatggaatgcagtggtgggatcttggctcactgcaacctctgccttccgggttcaagcaattctccagcctcagcctcctcctgagtagctgggattagaggcgcatgccaccacgcccagataatttttgtatttttagtagagacagcgtttcaccatgttggccaggctggtcttgtactcctgacttcgtgatccgcctgccttggcctcccaaagtgttgggattacaggcgtgagccaccgcacccggccccatatacacttgttttaaatcaacatttctctgtgtggataagataaaaattcaatgtgtattctctgtgaagcacacaaaaggacaagtcttcaatttaaaggatctaatagccttcgagtctcttgagaatctagattaatagaggttactcagaaaattgcagaacataggaaatccagctagtgaacctgtaacacttggatccaaaagctaaaatcctctcatgaggaaaagcaaacaaagacaaatatccacagatgtaataaaatacccatgacataagtatttcctgttgtgtttttggcttcacaaatacagtatgggtttatatatctatcaattatatcaacttaaagtgtagattatggaaaaacctacatttattatcaccatccaacagttcccatatttcctcatgatcctgttacctataagcatcaaaatgcaaagctggcttccacctgtggaaagtcgtccctgagagtcattattttccttttaacattgacatcatacactttgacctaaattaggaattaaaacactatcagagcaatcgttaaaattttataaggtaaacttcagttctttcttcggaggatcagaaatactcatgtagcctccatctaaggaatccaaggtgcaggaagcggaatgacgtaccagacatgacacagcaataagtggaagggttttgatgaggatcagtgcttctctgagtaaggtgaggctgaagaattgaggagtctctgccagccccaattaactcacttctttgaattctactgatggagattgttctgggaatatctgagataaaatttatctttgcaataactgttatttttaaggaaaatttcatgaacgaactaacagcaagtacaagattttggagactaacataatgggtgattattatggctacttaagctaacaaacttttaagatagaacaactattttgcatataaatattaaatcaagtgttttccattcaattcctaatgaggaagctttcctactggccatagcggatacctaacatcacttactagctgtttctttgttactgaacatggcaggagggggcatgggggggtgtcatgggactgcctactttcagaaagttcagctttttgtatttcatataacagcaaaagtttacaggacttggaagttcatatagtatttatattgtgccaagtagagctcttaacaagcaattactgtatacaaacaccttcattaaaaaaatgagaattttagatgacagtcatgtgtatcatttcttaaagataacctacaaggagtcaaaggagtttctctgtttggccaacacagaacagctgatgaataaatatattcataaggagaaactggctgaaaaataaaataccagtgctttgtaaaagcaatgatggaggtgagcaaatcctaatcttaaatgagacataaaaaggaccgcacgtcaattcaattgtttaattagagataattctcagaagaaaaggggttaattttttcaaaataaatgattcaatttatgataagccctagaggctttatgctaattacaagttattttaagacttgcggttgtaagcacagtttatggttacctctgtgagagctgtttggatcatgagagctctactttatgccttgttttagctgcttgaaatgagattttgttgttgtgcaggaacactaatataaaaagcagaatttgtgtgttttgttggtacgcatagatcataactgtgggccatgaggaatgtgcagctgttctttcattgcactaggaaggaaaatgttttgctgtgttacaagtctgtgtgcttataccttcctgacttgctcctttcagaataatttccccagagtcaaatcccaggcaagtgcagcctttacatattgagatgggcataaatgctagctcgaggctttttctgaagttgtgaaaggttgacagtactttactggttggctcaagtaagaaattatggaggttttcatgtcagaacagctgcacttacattttccatccaaaacacttaccaatttactcaaaattaggagataattgaaaagcagtttcataacattctggctttctaaaagaaaataaaattgttttaaaacatgcaaattatattgttaattgctgagtgtttttttctctcatagtagcggttgtgcattctgtctatgcctgcttggatatttatgttgagtaactacatttgttttgttttcagttataaaatgttcttttacttgagtaagagcaaattcttcccttatttatttttccagagatgtcatgctcattatgtatgcatttgggtgtaactacaacaaaacaaaatggattttcataaataaaatttacatagctgaaaagagcacattttatctccaagataagcattgccatcttttttctgattgttgctctgtaattcttctgaacaacaaaatgaaaataagtcaaaatgagaaatcaattctgtctctttataaaatgtcaaatatgtatgtcaaattccctaagaactgtaaatggctcttagtatttttaaaaatcctagatgtaattacattaagtaatttggtttccaaaggagtttgaataattaaaaagcacttgctgattttcttcagtagactaaaaagtattttaataatgcacaaatagcagaaattgaaaaaagacttaaatagaaggatcattttaactaaccaatttatgaattttgaaatttcaagcttatggtgtttataccaagacatgctacctattagttacaggcagatgacattagtgagaaatcagttatatgttaggcttttaaaatttaactcaattctaaaagctttcctctctctttacatggctgttccataaccatatgggagacatgaactccagttgactctggattacctacggaattggggtgagggttagtatggataaatgaaatccacagataatcttaagacattttagctttcatctccccaatctcccctgcctccaaattatttcagccgctgagatgcagcaaaatgtaatatgtccttgttttatttttttctcttatgtttcctagttttctcgattactttaacagaagtttagggaaaactgagtggtccgtgtgtaggcatgaggcaaaaggcattgaatttagatcctcatccttaaataggcatgactgtatgagccatgctgttttcttgcaaaccattttttttcttgcccctgacaaattgtaacctgctttctctggtgaaagcagttctgacccttttccatccctaataactgcttggaacctgactaagataaagggtcctgctgctgcagacgccagcttacagggcacaatcagggctagcattgattggcaatggttcattacccatggggacagctgccctgtttatcatcctaatcttttttggacccaatgttttttgttttttcacccactctgtggtagagctgaggctggaggaggctgtgcttgggttcatcttaccagctggaaagaatgaaaacgtgaccaaacacctgaaaaattgccacctggccacacaatgactttaatgagactggctctcatctccttctgggactgcaatcacaacaagacaatgtttgttagtttttaatgcaataatcagttcttttgaaggaaagcactctatgtagggttaggggtggctgggtggctaaaaacaaactgtgttttttaaaaaaaacatcaactgctgctaaaaaccaatgtgttcattgttttttaaagtcaggactatcatgtaagtagacattgcttttatttcttttgaaaaagaagaggctgattcaaatcaagaatctctcagtttatttctttgtaataatttatacatttataaattcaatcatttctgtattcttcctgtgaagaattattataatttatctggctctagagaaaaataaggacttgggtatccaagatttaaaccttcagtatctaaacaccaggaggtgctctaagataacatgaaacaacacatttccccgagatttacggattctagttacatgaaatttactgacaaaactgtttgctctgagaggccctaaacgttcagattctaaggtatgcagtgtagtagaccatcttctggatctaaaggactctttcaagggagaacagtagccctgtcaagatttcggggacattagtaaaaatttgcagagagatgttttctacatgcctatgacctggaactatctgtggaagatggtaaacaaagaatgttaatactragtttgttttgtgttacacagtttaaaatgcggtgagaaagccaggtgagactatgaaattttggagctggtgtattacattgtgcatggataagtactgtatttgctcttccaaaccagagatcaggtgaaattatgaagacaaccttttcaggtattatatagggagaaattaaagagaaatttatttgtgtttttatggataatcaataggatcctatcctggggaaagcattctaataagtaatttaaaaaaataagcttcattgagttacaatttacatacaagaaaattaatacaatgaattttacagttagaaatgcataatttgatgaattttggcagatgtggatagtcatgtaagtaccacaaaagtcatgatatagaacatttctatcatccaaaaagagttctttcatgttccacrtcaattaatgtcattgctccacaccttggaccctggtaactaatgatttgttttctattgctataattttgccttttctggaattttatattcatttttttttgtggccagctttttaaacttttcatactgcttttgagattcacctatgttgtatgtattaatagctgatttctttttatgacagagtagtattccattgtatggatgcattgtaatgttattatacattcacaacttgatgaatattgagtttttttccaattttttggtattatgaataaagctgcaatgaagatctgcatgcaagtctttgtatagacaagtgcttttccttttctcttgggaaaatacttgggaatgggatggctagaacatatagtgggtatatttttaactttttcaagatactcttataatatttttcagagcatttgtactgtcttacattaccgccagtagattataaaacttccaaattctctgcacctcaccaacacttggtatggtcagtctttttaattttagccattcatagtggttgtaacttgcatttacctaaagatacactgagaatcttttgtatgtgtttgttttacatgcatacattttctttaaaggagtttcattcaaatattttgccaaattttaattgggctgtgttttcatattattgaaatttggggattctttatatatcagagtacaaatgctttatccaatgtaggctttgcaaatattttcttctagttcatggcttgtcttctaattcattcttttcaaacaacaaaagtttttagttttgatgacatcttctttatcattgtctttaatggatcatgctttctgtgttgttgctaagaaatcttggcctgatccaaggttacataggttttctccaaagttttgatctaaaggttttataatttcagtttttactttaagcctgttatttgtgttaatgttatatatggtgtaagataggattaaaactcatttttttcatattaatttcaaatgttttcagcatcacttgttaaaaaagattatagtttcctcactgaattgcttttgcacatttgtaaaaaaaccagttgtccatatgtgtgtgcatttatttctggacactgcagttaatctaatgacctatttctcccatccaaatattagctaggcctgactctgcttagcttctgagatcacatgagagcaagtacatttagggtggtatggttggagactattgacctatttctttatctttataccagtaccactctgtcttaattcctgtagcctgggccaactacataatttttgggatctagtataaaataaaaatatgggttcctttgttaaaagttaagaatgtcaagacagagacaaagagcattcaaccaagcacagagctcttctgacagtgggaccttgtgcaactacacaggctacatgcccatgaagccagccctgatcacagcattataatatgtcttgaaataaaaatcaggcagagttagcatttccactttattcttccttttcaaagttacgttgactagtccaggatttttgtatttccatatgaattttagagctagtctattttttttttaaaacaaaccagtggaatttttattaggattgcagtaaatgtatagatcaacttgagggggatagatttctttgcaatattgtgtcatcagaccaatttagggctatgtgagttatttatcttttttattattattaagttgtagggtacatgtgcacaccgtgcaggtttgttacatatgtatacatgtgccattttggtgtgctgcacacattaactcatcatttacattaggtatatctcctaatgctatccctccccgctccccccaccccatgacaggccccggtgtgtgaagttccccttcctgtgtcaaagtgttctcattgttcaattcccacctatgagtgagaacatgtggtgtttggttttttgtccttgtgatagtttgctgagaatgatggtttccagcttcatccatgtccctacaaaggacatgaactcatccttttttatggctgcatagtattccatggtatatatgtgccacattttcttaatccagtctatctttaatgaacatttgggttggttccaagtctttgctattgtgaatagtgccacaatgaacatatttatcttttttgagtgagttttgtagttggtgtctattgaggaactgggccatgtcatcaatgttgtcaaatttcttggcataaagttgtgtccttccttattcttttttcatatatgtagcatctctgttaatagcacatctgtcattactgatattggtgatttgtatcttctcttttcttgatgaatttgactagagttttattaatgttattgattttctcatagaatcatttttggtttcatgatttttaaaatttaattgatttctgctcttatttcctacttactttttacttaattttctcttcttttcttagtttcctaaagtggaaactttcagatttgaaccctttcttattttctaatatggatgtttagtgttacagtttctccactagttattgtgttagtggcatctacaaatattgatgtattatgtctgtatttatatttcattaaaacggtttctaatttttaaatttcttctttaatctatgggttatttagaagttgttatttagtctctaaatatttcaggattttccaaaggtttttcccttatttatttctaatttaattctattgtggtcagaaaacatttgtataacttaaattcttttcatcttatggggatttgttttatcacgaagactctggtttattttggtaaatattccatatacatttgagaagaatgtacattctgctgttcttgtgtggagtgttttatcaattccatcttgggcaagctggttaatgtaggtcaatgttgtcgaaaacttttatgtcttcactgatataccagctacttttcaacccacttttgagagaagggtactgaaatatccaactgtaattatgggtttgtctgctccttataattctatcagttttttccttatatattttgaagttgtgttgttaaatgcaaaaactttagaattgttatgtctcctgatatatgttgaattcattaacaatatgtgatgacttcctctattgtcaataatattcttggctctaaaatataccttgtcttatattcattctggtttttctttgatttgtattagaatggtatatattttttccatcactttacttttaacctgcacacaagcatttaaaatgtgtttcctgtgggctgcatatagttgtgccttgtttttaaatccaatttgacttagacactattttcatctagaaataaatttgacaatttattttaattgaggatgtttagaccatttacatttaatgtgattattgatacagttaagtttcagtcttttttcttgtcatttgttttctggtcctctgtactttgtttaccctttgcaaatttcctgtcttctttgggatttaacatttcttatgattttatttcattttctttgcaagtttactagctcttactttttgtttgttttattgttttagtggttgctttagagtttattttatacatattcaagttatcacagtctaccttcaagtggtattatatcacttaatgtgtagtacaagaaccttacaatagtattatttctatttctttccttttattctttatattattgatgtcatgtattttattatacatatgttataggtattataattcattgttattatttttgtctaaatagtaaattatcttttttttttttaattttgagacagagtctcactgtgttgcccaggctggggtgcagtgacacgatcttggctcactacacacctggcctcccaggttcagacgattcttgtgcctcagcctctccagtagctgggattataggcatacaccaccacacctggttaatttttatatttttattagagatggggttttgccgtgttggccaggctggtctcaaactcctggtttcaagtgatctgcctgctttggcctcccaaagtgctgcaattacaggcgtcactgcgcctggccagtcgattatcttttaaatatatttaaatgaggaaaatatctcatacatttacccagacagttaccatttcaaatgttctttctttaaaatagattcatatttccatctggcattattttccttttgcctaaaggacttcctttaatttaaggaatgtttaaatatgtttaacatatctgtactgtgggtttgctggtgataaattttctgtgtttttgtgtgtctaaaaaaatcattatttgtctttatttttaaaatttattttttctgtgtatagaattctaggttggcaatttgatgtttattcattcagtactttaccagcacttcactgacattatttactataagaaatttgctattattattatctttgttcctatttatgtatcatgctattttattctgatgtgttaagattttctctttattattagttttcataaatttaattatgatgtgccttcgtgtagttttcttcatgttttttgtccttatagccactgagcttcttgaatctgtggaattataattttcattaagttcagaaaaattttagcctttttttttgtatcgtgccctttttctttacccttttggagaattcaattacctatatatgagctatttgaagttgtcccacaggataatactattctttttattcatttctttctctatgtctttcattttagatagtttctactgtgatgtatttaagttcattaatcttttcttctgcactgtcaaatttgttgtgaatcccaatgaatattgattttatcttagacactattttcatctagaaattttattggtattatttttatatcttccatagctttgactgttagtatagttgatagagttatattatctgttttaatgtttttgtctgttaattctaacatctgggtgagtttgggtctgattttgatttttcttatcatcatggctcatattttcctgcctctttgcatgactggccatctttgactggatgcttgaaattgtaattttatattactgggtgctagatatttttatatttctatcaatatttttgagctttgtttttggattcaggtaagtcgcttagaaacagatctttttgcatcttgcttttcagatgtgtaatgcaggagcagtacagcagtttagtctagagttacttatttctgaccaatgaggcaaagtccttctgtgaactctacttaatgcccctgaattatgagattttcaagtcaggctggtgccaacaagaaatattccaagaactgtgtacatgccagatttccgctaattgttttgaatggctttctggactcagatggtttcctcacatgcatgtactgatcagtactcaagggagactctctgcagacctctgggatctctttctgctcaacattttcttctccagaactcttccctgcaaaatctagctaccttaagcatccttagatttttagttccacttctactcagggagtccactgggctttgcatgggttgtccctctctgttctgtggtctggaaattcttttgaggcaatatatctggaacaatcgtatggcttacttagtcggtttcttgtttctttcgcattgctgtccttcattgcctgatgttcagtgtcttgaaagccattgtaacgtatattcttgtctgttttcttttgtttcttgttatttcagctgggaggttaaatctggccccttcttaactagaaatagaagcaattcccatactctttttaattttttgatattatttatcagactttgggtttgtttagatatctgtctattttctctctcactggagatcaggtactctgttgtgttcacattttttgaacattagtgaatgaataaatgaatgaagtatatgatctaaaatgacaatgaacatagaaatcttgaaactttctgtaatcacctaccaagttatcttgccttataattgttttatgttgataatcagtggctcttttctaaagaatttgcaacattttattgataattgcccactgtttctagtggtaagaaaagagtcctttctcctcagtttgcagaagaaaaagtagagcatttaaaacttttttagagtgtcaagcaaaggttgtttgcattataaaatcaatgaaaatactgaagcttttcatctctgaaaaatattgaatatgtaaattagggcacaaattttagtttgctcttaggtagtttgatgataattatgagagttatattatttaaatctaagctcttgagagttctttcttttttatatttctaagagagcccaaccttatgttaatgtacaaattctttttgagtattagtgaatcaatagttttcacaaattatctaactcctcattatcctcactttccagtatgagaaatctcatttaatttaagataagataatatctgttactgtaataattcagttctgacaaattttaattttattttaaaatactggcagaaggtaaaatctcaaatatgaaattctccttttgactttatctatctatttatcttttggaactcatggttttccacttgcttttttccattaacatatcttgaagattttttctctattagcttttataattttacctttttcttttaattgctgcagaatatttctcatgtacatgtattataatttacataatcaatcttccattgaagttttaaatggaattctttgtgcaactaagaatattactatcaaccacacctttttatgtttgatatgaaacatctgtgaaccttttaggatttgtatttaatttaatgaattttctggaatttttggaccattccattggggacatttagataatttctggccaagataaagtgtgactgctttgaaaagtctacaaaagcaacctttacaaaagcttctcttggcaaagcacagcctagaaccaagccaatagcatttttcagcttcactgcattcatggcttttgaggccatgaggtgtcagtatcctttctgtagatgtttcagaagaatgcctcaattcatatttcacttgtgggattttgtagtttggcataaatgaacactacaaataggttctagtttggtgaccatatattacaaaaatggttggattcatatttatgtatattcgtgaatttcaggttttttgaaattgatatccagcctgtgaaatcaggtgtaatgttttcaaaagtaaaatttagtattactaacacgtttcaaatactattttataatacacttgtttattagtctgttctcatattgctatataggactgcctgagactgggcaatttataaagtaaaaaggtttaattgactaataattccacatggctagggaggcctcagaaaacttacagttatggcagaatgggaagaaaacacatccttcttcacatgatgacaggaaagagaagaatgagagccaagcgaaggggaaagccccttacaaaaccatcagatcttgtgaaagcttcctatcatgagaatagcatggggaaaaacacacccatgattaaattacctccacctggtccctcccatgacatgtggggattatggaaaccacaattcaagataagatttgggtggaggcaaaaacaaatcatatcattccatccctggcccctcccaaatctcatgtcctcacaattcaaaacacaatcatgcctttccaatagtcccccaaagtgttaacaaattccagcataactcaaaagccaagtccaaagtctcatctgagacaaggtaagttccttctacctatgaacctgtaaaatcaaatgcaagttagttacttcctagattcaatgagggtacaggcattgggtaaatatacccattccaaatgggagaagttggtcaaaacaaaggggctgcaggccccaataggacagtcattaaatcttaaatttccaaaatcatctcctttgactccatgtctcacatccagggcactctgatgcaagaggtggtggccttgggcagctccacccctgtggctttgcagggtacagcccccttcctggctgctttcatgggctggccttgagcgtggcattgccaggtgcatggtccaagctgtcagtggcagtaccattctggggtttggaggatggtggccctcctctcacatctccactaggcagtgccccagtgggactctgtgtgtggactctgactccacatttctcttccacactgctctagcagaggttcttcatgaaggctccacccctgcagcaaacttctgcctggacatccaggcatttacatatatcctctgaaatcaagatggaggttttccaacctcaattcttgacttctttgcactagcaggctcaacaccacatggaagctgtcaaagcttggggcttgtaccctccgaagccaaaacctgagctgtaccttgaccccttttagttactgctggagtggctgggatgcagcgcaccaagtcaataggctgcacacagcaggggggtcctggacctgctatcaggaagccattttttcctcctaggccttcaggcctgtgatgggaggggccaccgtaaaggtctctgacatgccctggagacatattctccattgtcttggtgattaatatgtagcttcttgttacttatgtaaacttctgcagcaggcttgaatttctccccagaagatggggtttccttttctattgcatcatcaggctgcaaattttccaaacttttatgctctgcttcttcttgaatgctttgctgcttagaaatttcttccacaagataccctaaatcatctctctcaagttcaaagctccacagatctctagggcaggggcaaaatgccaccagtgtctttgctaaagcataacaagagtcactgttactccagttcccgacaaattcctcatctcagtctgaaaccatctcagcatgaacttcattgcccttattactatcagcattttggtcaaagccattcaatacatgtctaggaagttccaaactttcccacatctttctgtcttctgagccctccaagtctctaggaagttccaaactttcccacattttcctgtcttctgagccctccaaagtgttctaaactctgcctgttacccagttccgaactcactcccacatttttgggtatacttatagcactccactcctggtaccaatttactgtattagtccattctcacactgctataaagtactgactgagatggtaatttataaaggctaaagatctaatttaatcacagttcagcatggctggagaggcctcaggaaacttacaatcatggtggaaggggaagcaaacatgtctttcttgacatgatggcagaaaggagaagaatgagagctgagccaaggaggaaggccattagaaaaccatcagatatcatgagaacttattcactatcatgagaatgccatgtggggaaccacccccatgattcaattacctccacctggtccctaccgtgacatatgggcattatggaaactacaattcaagatgagatttgggtggggacacagccacaccatataagcttgatcaaataaacttttttcaaaaaaaaaaagaagaacagaagatcattttgaaaataacaaaaatgtgccacacatttaatactttttcttctaaaagctttagatgcttccttagatatcatcaaattatatgtcactgcagtcctggaagaaagatcagtgataggaattgtaggcatttatgggcttcatggttttgtccaagataaaaagaggaacccctatttattgctcacatcctttagaaaagtaacttaccatacattgtctcttgttagcctcagaacatcaacgtaagggaggtattattagccctgaggttcaatgacattaagagtttaaacaaagccatacacctagaaagtgaaagtgagggtttgaactcaggtctttcttttttcaaatcttgtgctttttcctccaaaaggaatattttttttccactatagaatacattttttgtgtatgtgcacatgcatacatgtgtgtatggagagttgctccagaattctcatacatttctatatcctaatgtaaagggaaaaaaaatccacatagcctatatttgttttgaacaggaaagaaaataatttttttttttttgagacggtgtcttgctctgtcacccaggctggagtgcagtggcacgatctcagctcactgcaagctccacctcctgggttcatgccattttcctgcctcagcctcccgagtagctgggactgcaggcgcccaccaccacgactggctaatttttttgtatttttagtagagagagggtttcaccatgttagccaggatgatctcaatctcctgacttcgtgatccgcccgcctcagcctcccaaagtgctgggattacaggtgtgagcctccgtgcccagcaagaaaataaattgataggagatggagtccttactaagaatttgattttttgacagtttaaagaaaaacacatttttaaaaatatatattccttctttgattttcactggaattagaaaaaggagaataatgttctcatgagagaagtgtcctagcataataaaagcaaagcctaagaatgaattgtttagtaagagatttcctgtggctaggactggaggcaaatttttttgaacagtactgtctgacatatattcaaagttgtttactattctatgtgatcattatcctctttgtctttaaatcttcaaattggttacatataatatccttgtgtttgttttaatttgggtaatgagggagaagatgatggccatggtgggcaaaataagaaagggcttagcagtacagaaggctaaccatgaacagcaatcaaggattaagcaggggcagcaacttaaagggggagggagaggagatttcacttctcttccagatttccattctgttcttctcagagaatctgcagcaatattagaacactagacttctcatagtaagtggaatggggactaaaacctaaaagacttgggaattctggggaggagggtggaagacttggggatatttgatttaaataactttcataatcattaggctttcttgttttaccattttgggtagctataagatacctcacaaaaatattcctgtagttaccttcagtatctctgaagtgataacttattaataaaattatcattagtgccctcatgagacatagaaaatgcttggttgcattctctcttcctttatttcctctttctttttgcatatttggggggtatgtgtctatctgccgatgggcagaattttttaaatatagcaagtggcttcctaacaaggtgtttaaaattcataatgaacatgttataggttttagaaacaacctcattgttaataagactgagaacttgaggcacaaagagagtaactcgtttcagcagaatgtggaatataggcacaatagcatgaggtaaaacaagctgtagtatttgctagattatataggcagtcaataccattgccttcatgtaatttaattcttagttttgattttctgttgaagtaattgatggaagatcaacataaattaaataatattttcattttttcttaaagacaagtaatacaactctgttttgagaaaatactatttaaaatatctatttttaatgtaatgattcagttatctatttctttgagttttcctaaattaagttttgctgttaaaaaaccttaactagataagcatctgttccttttgcatggttggagtctaccctcttcctaagaataaactcatttcagttatttttctttaataaagcctgctctaagactgccatttatgattctcaatttgagtggccttttctcaatgcctgcaatttaagtacataatattttctattgtttttcctgcttactctagtaaattactgccattgtctcctgatctacctactgtttcaaatctaaattgacaatacaaaacaatttgaatatttggaacaatatttatcctctaacataggtcagatattaataaattcttacagaatccccattaagagaggtggctgtgtcatggctaagagcatggacttttaaatgaaatgcctggattttaatccaggcttcaccacttacaattctgtgaaactggacaaattttaaaatctctctttaaatggttaccacatctggaaaatctcaatgaaatagcatatttcctatctggttgttgcaagaaaaaaatatatatatatatatgtgccaaattacagcaaaatctatcccatggtatttcatgtattttacattaaaaaagtacactaagaagcaaattcatttaatagtcaaaataccaattaaaataatctctaatgcagtggtatgttgatttaaatcatccttaatgttatctgcagtatctcagttgttagaggagattatttaatccatgaataataatatattattgaaagcacaagtatattggcatctgtcttagtcagtcctggctgctgtaacagaataccatagactgggtagcttaaacaacatttattcctgagttttggaggctgggaagtccaagttcagagcaccagcagatctctaactcttggtgcacatcagtaacccaagtctcctctccttgagtgtggatggaaactgtgatttgtttcttaaccaatagaatatggcaaaggtgataggatgtatgtgattatgtgcatgtgattatataagattgtaatgcgtgtcttgtgaaaagcctttcttttttgttggctttgtagaggaaagctgctgtgctgtaagaagtccacagggcaagaaacttaggccctcggtctggcaacccacaagatactgaatattcctagtagttacatgggcaaagaagtggaactttctcctctcaagctttagagaaactactaggctgacaccttggttgtagccttgcagaatactcagttaagctgtgctcacactcctgactcacagaacctgtgagacagtaaaagcatttttatggtactaagtttgtggtaataggtaggtaattaacacagaatctttgctctgtagtggcagaaagcttagcaaaattgtctcctacaatttatatggaaagaagaatttgtaaatatcatgcacatagttatctagctaaggagatttttgaggaaagtattgaatattctgcctaatttcttcttgctgcttacggtaagatgcaagaggagaggtataaattgacagaactgttaaacaaaaacaaacaagggctggatgacttaggaaatgctcggcctctccagagacaaaaaaccccatgacatttgagaaatgactccagtccctgccacaaatgaaggtctaaagaaaaacatgggggtgtgattgtacaaccttttgttaaaaacctcggaaaaatcaaaggactagagtagtcttcagttacataaactgccctttcaagagattgaaattgtgcctcatggaactttttgattaaatgatagtatctctaagaagttaagtgtattgtccttttgtctaatggagtgaacctcagtgaaattcacaggagtcctacgaagtatttgagaaaattgttacagcaaaagcaatgttaactggaactgaaagtggcagagaataaaatgtgaaagaggcttctggaccctcaaattttaggcaggagcaggctgttaaaattactcagctgcaaacatgtactttctctctctctcacacacacacacacacacacacacacacacacacacacacacacacacgaaggatgattcagagggcaaagctgagagccatgaagaattatcctatgctgagaaacctagttaagaacatttttaaatttgccaggctggatttcagaattgctatggaccagtgacgactttgtaccttctatttcccccattttgaacaagaatgtctgtatgtctatagatgttttcttatgcctgttcaaccactatatgttgggtgtgtgggtgggcaaataacttgtctttttagtttgacagattgacagatcaatttaaacagccttcatcaatgcctggacctgatttagataatacaattctggatattgtgcagatgctataacagggtggaactctgggggaccttggggagaggatgagtgtattttgcacgtgagaagaatgattcacattcttctcacgtgcaaaatacactcatcctctcccaaggggggccagagggtgaactgtggcagacagaatgtagggtgcctccatggtctccacctcccacatatttatgcctttatgcagccacttttccttagtgtgagtgggatccatggctcacttctaaccaatgtcaaaagagatgtatgtatgtaattacatgaatgtgatttagtcacatatgattgcaattgtatcttgcaaggtgactctctttttcccttgctggctttgaagaagcaagctaccatgttataagatacacatgaagagggtcccatggcaagaaactgagagcagcctctggccaatagccaataaggaaccaagatcctcagtccagtagcctacaagaaactgaatgctgccaacaatcacaggagtgaggaagcagatcctttcctaattgagccttagagaggaaaccctggcctataccttgattgttaccttgcagaagagccagctaagctgtgcctagactcctaacctatataaactgtgaaataataaccatgtgtttttgtaaggtaccaactttggggtaacattgttgcacaagcagtcaacaatgaatacatagaatttactaaaatgtaagtttcatgattgcaaataattttgcacatacctagaaatgggtctggaatttggaggtgttcagtaaatattggtaggaaataaagaagtcagaaagaaagggaggaagcacaggacagccactgagacatcagtgtggtcttgcgagcagactattgatgtgtcatgtgatttgctggtacaaagtaagtttggtaggatgtgctggaaaagtttttttctacatgattttgtatctgtgtcaaatgaatatggttatttacatattgagttgagggatttacatgtaggtgtttggttaggaggaagaaatgacatggatgtcaagtttacaatttctcagtactaccctattccctaatattgtgataagaactagttatagcagtccaatctcaagaaatagctccactacttctcacttctgagaatatatcatgattatatattataaatatataattatatgtattgcatatattatatgtaattataatatgtattattgcatatataatacgtaatataacatataatatataattatatataatacatatataattataatgtattttattctcagaggtgataagtggttattatataagaggtggttatataatatataattacatataatatatagtatataatatatatactgtatatacatatataatacctgtcaagtaaatggaatcatacagtgtgtgatcttttgcatattgctttttcacttagcataatactgctgaggttcattcctattgtactgtgtatcagcaacttcctttttactgctgaataatgtgctgttgtatggttgtgtcacattttgtttaacaattcaccagtcgatgaacatttgaattgtttcaactttttgtttaatgaaaacaatgctgccataaatatgactcatatcacatgaaagtctttgtatggatatatattttcatttctcttgggtaaatttctaggtgtaaaattgctgggttatatgatacatttaagttaacttttgtcatgctatcttcaggacaagatttagaaaaacaaaaccttgtagtgcttaacaatgctctttataaataatatttcttaaagctcttttgacttgatttgcatgtttgaaaaaaaggtggagtatgggctgcttattttatataacaaggaatattaaatgtataaaaaagcacacctttaagtggaaaggatatgtagtactctagtcaactactgatagaaagtatacatacagagagagattaggtattactttagaaccccaatattacccaaaatgattcacttataggaatacttgaacctatattaaatgaaggtaattaaaaaaaattagatgcatggatctaattatcacacattttgaggaaggaaatataagaagccatttcatatacttatttatataacatctctcaagtgcagaaacataaagctaattagtgtaaattaatgtacaaatagagaattcatagcaaataaaatgagaaactatgctcagaaaagattgcttctattgtaatgaactgcaaatgccttagcattttcattggcttggtaaaaagttcattgatctgaataaggggaatcatgagtgtaactgtaactgtttttttttttttttttccagaaacaagcgtcactacaggctttataagattaataaagttttctaggaattaagtacaaaatatccagaacagctttcaactcgtatgttatgtgtatgattcttcttctcactttaatgttaatttacttatttgtggaattctagcacaaaaaggcacttagtgaagattaaaagtgtagtctttggaataaatataaaaggaaaataacatcgatttagtttgtcttcctcataggctgcaagagattaaaaaatgtaacatgatttaagaaggaaaggcataaattaatgaacaatagatgatgggtctgaagaaaggtatataagatggttgtatacgttcctaagtgttttggtttgtttatatggagggcatcaatattatccctggagacttcttctaggtaccattgtcaaagagagaataatcagctacagaggccatgggtgcaacacggtgtggtatttcttctgttctaagctctaggtatgaaaggctgggctattcaagagaccaatactaagtgcataacaattctttacaataccaagctttttaaaaagtcaccattttttttttggtgtccagatgtcatacatacattttgcaatggtaggaaacttaaaaaaaaattatgtgtacacataaaagattgcgtgagtgtgtctacactaggactaaaatttggggaatttgtaagtcaacttcagcatgggaaaattaactggcaactgggtaactaatgctttttgagtgactaccatgtgctaggcactgttgtaattgctgtatacatgttaacacatttaatcttcttaacagtcctatgatgtgggtataattagggtcatttccatttattggatgaggaaccgtgaggcactgggagttaggtaaatggcccaaaattacacagcttggaagtgctgaggtcaatatttgaactcagacaatctggccccagatcttacattctaaactaatatgccatatcattctctttactgattacactgagtaacttctttgtagaaagtaagatatacttatctgagtattgccctgttatcccaaaatacatactacaataaaaatccttcatatttaccgtatactaattgaatatttgtaatcatttgaaaaaatgtaatacatttccatgctgttaataattatgttgagaagaaactattttgtaacttttttgaaaacggaaagtacttttctgtttaatatcttttaaatggaaaatactttctatggtcgtgattataaactttcctttggttttaattctgtctcagggtttgttggtggtgaacttgcctgattgaaagtcttgggcaagtttgggatattctcactctgacttaagacttcgcaatgcatttgaactcctctgtcctgggcaatgtcaggattggttcaaataattattcataagacataaaatgtaatgagaagaaacattataggcaaatagtcttttagaaccttgttttaaattaaaacatggttttaatttacttgggcattttaactaatgcttaggcattttaaatgcaaaattgatagcatcattaaccaaatgaaaaatcataatatatgtctttcagataaccaaaaagaggtggaaaagtctagcaattgataccacaaagatactgaactgtggtttagccaagtagagggcatagctcctgggagtggaacaagttgcttctgaagtatgagtttataaacctcaaaacaagactagtgacaaattttgcttcaatacgtctaagttaatatataaaataagatttctggtggagaggtttatagatttttcagtaaacaaattgtttttaaacacctttaagctggagaagaagcaactgcctacctgtaagtaattggtatgctaactataggtaattcttttctaggcatcagccaaacctcataaaaaacactactgtggtagttatttcattggtttgaattgtctcaggcacttgcaattttttcaaagattatatttctctgaaaatatcctataacttaacattttcactcttctggctgttctttgcctggttacttcaaggggtttctctcaagtactaccgtaacttacaggatggatgttttcttattcctatctgcaattctgtgaaaataaagcaattgttcagtgggtagtaatatgaatgcaaaaatatgtctccacagaagcattagcataatttactgtacattcaatgaaattaagacagccaataaggaatataattcttatttattttgaaatgatggtaacaaatggctttgttaccttcaagcttcttactggcttaagctcttttaaaattctatggactatataagctactcaattttaagttttcatttttgaattcaagcttttttggttaggtaaagaatagaagtaactaccataaagaagaaaatataatcatctaatttctcctgaactctgtataacattggccattaatctacatcaatatatggtgaagatatgtaagcagaatgtacaatgtataagacatgcatatatcaatataaggtagtaatgtttattttaaattccgcagatccatttagattcctttggttttatatttggtctattttgttactgcctctataattctgcttatttatttcaaattttacaacatctatttctcctttgagaaaacgtagacaactgatattgggatagagtttaaattgtgagaaatattcagttacagtaaaagaaatgcattagaactagaacttgcgtgattttaaattttattagaagtaggtgtcaagttacctaagatgtccaagagacagctgatgggttatgagttaaattttgggttctgcttatcatttcttagaaatcaatttaaggcatcagttttcaatagcttttttatgtataactaaaaaagagatatatgatatttggtaaaataaagatacatggcttccagtctcttgagacatctgtcttcatgaaagagatggagagttcccatttctacttacaagaatgaatgtatgtcataataaagaccagctatcatttgttatatacaaaatatgtggttctttctttgactttttttctggatttagacaaccacagatgacatttatgagaaatgaactacactgaattcaactgagaaagtagaagattctgtatctccattaacttgtgagaggcttatcattccaaaccttctccagacagcccagcgatcttcacattctctcaactccgtggtctatgactgtcatttgtcaattaattgcaaactgagttcatatatagtctgtgtatgtttcagtacacatgtaggaatatctagggaggtattgttgttctgggctctttggaaatatactctgagaccctgagatttacatgaggaaagtttattgaggaatacttttgagaacttgagtgaggaaagcagggatgggcagagggagaagttgaactgtgatgcagttgcaacagaatccctaccaatcccacaggaagggggtctaactttgggtgaggcggcactttttgcctgagggtgattcccaaggaaagactaagctctgaaccactggcaaccaatgtttctgatagctgatgaaatgagagcctcagtctccaagagtgaaactccatctcaaaaaaaaaaaaaaaaaaaaaaaagaggaaacgagagcttcagcctcagtcctgaagctgggatctagcaggtacactacagcatccactacggtaggtaatgtaatgaaggttaatagcacagtccaacagacagatgcattggcttgaaacttgcttctatcatatactggttatgtaggcttgggcaagttacttaacctttctgtccctatgaagcggggataaagatactgcaggttatctcactgagttattgtgaaaatggatgagttaacacatgtaaagcttatagaagttcttggaatatggtgagagctcaacactcgtcagccattattattagaggctgctataaaataacaaaacttgttttcaaatgaacttacctgtatgaatatttgttcctgtttaggtcaggtgggctagtaacaaatacactccaaatctctagttgcttcaaacaacaaggatttatttcttggccatgccacatgtatatcatgtgttgactggtgttttcctcactttaggactcaacctgacagagcagccagtagctggaacattgcccctgctgtggtggagaaaaatatagcatttgaaatgcatgctgactcttaaaacttctacctggaaatgaaacatgccatttctactcgcatttcattggtcaaaataaatcatgtaggtacatataactctgagtgggaaggaaaatgtaatcctgccctcttcctggaaggaaaaccagaaatacttcaggaacagcactaagattatggcaatttaatttttaaaagttatctggggagatatatactcagttctgaaagctaactttttttgagcacttagtatcagccaggcactgtgacaaagagcaatattatgaaatagattctattgcagtaatatcccaatattgtacacttagaaaaaaaaagctgaggccgggtgtggtgtcatgcccgtaatcacagcactttggattgccgaggtgggtggatcacctgaggtaaggagtttgagaccagcctggccaacatggtgaaatgccatttctactaaaaatacaaaaattagctgggtgtagtggtttgcgcctataatcccagctacttgggaggttaatacacagtccaagagacagatgcattggcttgaaacttgcttctatcatatactggctatatacaggagaatcacttgaacccaggaggcagaggttgcagtgagccaagattgcgttactgcactccagctagggagacagcaagactgtctaaagaaaaaaaaaaactgacacttacagaaacttgatcaataccatatatctacaggatggtgaacacaggctcttattcaggcctatctgattgcaaagctcatactcataactaccactctacttccccccaagaacttcagtgatgccagcatgacttgaaattttttcaacacatgttctaagttttttcccaggaactgcttttagagtctatggtttagaggaatctaattccctaaatgtatgaactctcatatgtagtagaaacttctttcttgctcccatgatggtatcagatgggtagatagaccagtagagtggtcctcttccatggagtgggagactgatggacactccatcttcttcggcacaaggtattcaggggttatcttcttccatacagtcagaaggatgccagcgggccaggcctggaagtgatgcacataacttctgcttacattccattggcttgaaactcagtgatagtgctatacctgactataaggaaggctgggaaatgtagttaggctgtgtactaaatgtagacgcatgtactgtgctgtgtgttttcaaggtattgaatagaacttaaaattgggtaaatatacttgaggacggcagggaatctcttaaagtgacttcattgtttggcctgcaatcctctctcatttcagtattccagaatattgtcttattttagtttattccgctctctaacatttagtatcctgtacttcttaacatgttttatagtttggctttgtgctaatggaaagattatggttagaattctttacctttcctttaattttttttttagtatgaatacaggataatacagaggacactctgatagtaattagtaaagaaccctgcattctgaccccagaggagggcttcacatgctccttggccagcactgcatgctttaggggcccacaaggccaccagataactctgaagtctggtgggaaagcaacattttcggacttagcccccagagggctcctaacaaactatatgagtttttaaggagcttcacaggggatggagtggcagagtggattgttgaactggaagggaattttgaaagctattgcaatgaattgcaaaacttagcctttattaatgttttagaaactttcctttgcaggttgggttggagctgttttattgcctactcccataattaatcataaggttactaaaggttggattctatatcacaccatgattctagtgtggtcatcattactggaggcatgaggagtccagtaatgtatatcacttaaaaatttttaaatgctttcactaacactatatattttttcattttgttcactagggagactcagggtctattctccctctactttgtatttctagactaatctagggtttttatattttgttacatggaacatgtatgtataacgtctctaaaagttaataagacagatacctgcaaaattatttggtagaagaaaaacaggttcagctaggttgtattactttcctcaggtcatgtagttggtaataacacctcaaattttgaagcaagttcttctgacttttcattgttcttctccctaactatgttgcttatcatatttgttagaatgcaatctagaaaagtaaatattgactctttgaggatcaattccagttttgagaatagccgaaagttgcccagtattaaaagttggtgactaagttagataacattattttggataaataataaggtatgtttataaatatttttgaagctcattaaattgacaaataatatatatccttaaaatatttgttagcttcaattgacaaaaatgcacaaatttaaaaaaaatgcataagctgactatgtatccatgtgactatcaattattttaagatcggaaccagatctaaggaaactgaaaacagaaactagctgaaagaaaacatgcagagttcaaacaatggccatgtttaaaaactgaacttttcttttcagtgattttttaatgaagtctagtatgcagcactaagtgtgtgacttggcctttgagaggggttattcataaaggtggagggggaatgagcagttattcctatccattatgtgttaggtgatttatttcatttaatccttgtatctgtctatgaaacagataatacttctattttaatgatgagggaagggctcctggttttcagtacctgatcaaaggtcacacagctagaatcacacagccaccataggaggcagagcttgaattagaatcctagtccatctgttccaaagccaaggtctttcttccaaacaatgctgcttcttttcaaagggataagaaaggatggggatgaagtaggttgaatggtggtttcattcatgaatagttgttctgagggtcttagtcattacaataaataacaacaacaacaacaaaaattataaagattacaaaagaagtgaaagtgttccctgctatagactgttcccaaaggaaatatgcaagtctccaaatcatctacatgaactaacaaatacattcagtaagggcacaggaaacagagttaatataaaagaatcaactggttccttgtgtaacagcagcaacaagtgaaaagtgagatgatataaaatcctatttacaggagcaccaaaaatatgaaatatttatgaataaatttaaccaaaaaagttcaagatcactacattgaaaacaataaagcattgctgagagaaaaataaagagggccaaaaaaggttcgtggattagaacactcaatattgataagatgacaattctcccccagttggtcatagagtcagtatgatccgaataaaaatttcagcactcagttttgtagaaattgagaagtgattataaagtttatatgaaactacattaccaaggaaatttttaaaaataagaatggaattggaagacttaccttacttgattttaatacttacaacaaagttacagtaacaaagacagtatggttttggtgaaagcacacacatatagtttagatcagaacagagtccagaaatagagccacaggtacttggtcaatgaatttttgacaaaagtgctaaggtaatataatgggagaaataaaagtcttcaaaaaaaggtccaaggtcaactaaatacttgtgtggaaacaaaattaacatgtatccttacatcaccctacactcaaaaattaaattaaaatgaatcatagacttaaatgcaaaatctgagattgtaaatcttctagaagaaaatatagaaaaatatcttcacaaactagagataggggaaatattttggaagaaaaaagtgcatgaaacataaagaaaacaattgacaaattggatttcatcaaaataaaaaacatttgatttttaaagacaccactaataagatataaaatcaagccacagactgggagaaatgattcacaacacgtatatgaagaaagtaacttatatgtagcacaggcaaaaatacagtcatgactcattaataagacaaacactaaataaaaaaataggcaaaaggtatgaatagactyytccagaaaagatatatggatggcaaataagcacattaaaaagtcactagggaaatattaattatgatcmcaataaaatatctctatatacatacatattaaaatggctacaaatggtaaaaaatgaccattccaaatgttggcaaggatctggaggaaatagaactttcataaactagtttgattgtaaaattgtacaaccacattggaaaacacttttggcagtttctttaaaagttttatacataccctatggcccagtcattccacttctaggcatttactcaatggaaacaaaaacatatgttgacctaaagatagtatacacatgtttatagagttttacttataatatccccaagctgcaaacaacccaaatgtccatcagtggatgtatgaataaagaacttgtgatatatccatgcaatggaatactactcagcaataaaaagaaatgagctgttgatatgtggaacaacacgtacaagtatcaaaataattatgctgagtaaataaagccaggtaaaaccagggtacatattgcatgatttcattttaatattgttaaatgtaaatttatgtatagggatagaaagaggatgagtgattgctcggggaagagctgcgggaatgcatggcttatagataggcacaaagaaacttttaagagtgatggacatgttttctgtttttatcatgatgacatttgtatacatgtcaggttgcatgccttaaatacatacattttcaagtacttcaattatgccttaataaggttgaacaaattagcactagcagacaggtctatagattttccagctgtggagcaagtgagcatccattcttaaaccctaggttaaattccagattaagatggcataaatctaattttgtttactcctgataatcgaatctaaataaaggaattttttaaaagccacaaacctttaacaaacaagaatagggaaatgacaacaataaaattttgaacacttgaatcagattgaaaagtagtaaattacctgagaataccaaatcttcaactgggaatgagtaaagtcaagaatcaactcagctgatgttgcaaaaggctcaggaattatcagcactgactactcttggaagtgggaatgaaaggatgaaggtaaataagaactgtttgcaatctgatttagaagcattagatgcctagattccccctcacctgctctatgatcctatgcactgcccttctctgtccagacatagaactggaagtttattcctgggttgagtaaaacagagagtctctggactggggatgcctggcaaaattgagaatagcttatactgaaaataaggtgctcagagaatatgtgcacaatgaatgctgaggcttgtagcctacttccctcatggacttgagaaacaatagtaggcagacttttccttctgggcaggagattgaatactctatggaatctgaccagcccaagaggaaaacatctaaagaaactgacattgaaggttccagacgaacagcccacccagttctcttgactgtgaaactcttggtacaaaagctgcgcccttggacttatagcttccgtcaactttttagctccctttcctaaatatgagaagacaaccaagaattgctagatagctgatgaaattcctaaatgagatataacaactaaaaaagaaaaatccaatttggtggaaagaatacttttcaaaaactctcattaatatctccagaaacagaagaaaaaaattatatacttataaagaacaggatgcttcaaaatgaatattcaaaaaaaccttggaaatttaaataaagtagaaaaagaaataaaatgctcaaaaaaagacttgagagataaaggaatttcttcctgtgactactgcaaaaccagaactcaaagcaaaataaaacaaaaaacagaaatggaagctaagaaaaaataagaaaatcagaagaccagctcaaagtccaggagtttcagaaagacattccagagaagtgaaggggaggaattcattagcaaaaataatttaagattattctccaaaacagaaagatgtgattttctggaatgaaaggatgctgcaaagtcattaaaaattgatctactaccaaggctcatcatgatatttcagagtactggggataaagagaagatcacataagcttccaggggaggggaaaaccatgttatttaaaaggaaaataaattagaccagcttcagagttcataaaagtaacattgaaaactataaaacaatggagcaatatcttctacattcaaagggaaaataatttccaacctagaaatctatactcagccaaacagtcaataaaatccaaggaaagtctcaaaacgtttactcccatgtacccttccttgggaagctactgaggatacactttattaaaacaagttagtgaaccaagaaaaagggagagattggatcgaggaaacaggagatccaactcaggagacaagcaagctccctttgtttgatggtgaaaggaaatctttgaatgagaattatcagacataaaggggaatcactggagtgtaaatcaggttataatttcagagagagagatgtcttcaaaaacacaaagttgatagaatagttaaggtaaagaaatgtattgagaaggtatttagcgatatagggaagaacttgaagctgacttagggataagtacataaaaagttaagcaaataggggaaaaccagaaacaattgttagctccagggtaagtaggatattgagcagggaagaattttaatcataatttatattatggttcatttttgaattatatacatagatttgataaaatactgaataatcaaaattttgatttaactctatactaggaaggaatggggtatggggagtgaacatttacttggagagcaaaaagaactaaactcttaccttgtgtagttaatacataacacctaaaactgaaaagaaatctagaaatagcagtatgatcatgtttttggggtaaataccaagactcagctaagagttgaaactgattactttgtggaaggagaaatggaaaatgggggtgtcttgagattcctgtttgtattaacaagtcatagaagtagcttactcttgaactatgtgcatgtatcactttgataagaaacaaacatttaaaaaaaattgtcctcagttctagaattttcaacccctagaaatttctattcactctggtgtaaaccttgagaacctcccaaatatgtgatgagatcgtggatctcataagctctttgctctagggtagtttcaagcatggcttacatctgacatagccgacctcctggtgaatgatagacaagtgagaatatccaggtaatattcgcccttagaaacgtggagagtaactaaattttgttacgttggggatagagacaagaggagagtggttccaccatcagctagcttgttagcagaattttcatgtttgaagcagaaatattaacagaaaaaaaaatgcaccattaggtacgtgagtgatatggtctgaatgtatgtgtgcccccccaaattcatatgttaagacataacccccaaggtcatggtagtaaaaggtggggcctttggaagatgattaggtcatgatgctaaagctctcatgaatgtgattagtaactttataaaggggcttgaaggagcctgtttgcccctcctaccatgtgaggacccatggaaagttccatctttggagaagagaacaggccctcagcagacatcaaacctggtggcacctggatcttagatctcagacttcccagactccagaactgtgagaaataattttctgttatttaaaagttacccagtctaagatattttgttacagcggcctgaatggactaagatagtgggaaaagtaaagatgataagaacagctaagttcagagcagattcatttattggatcacaaaggaagatcttattcttgttttggacccataattaatttcaaggggaagtttgctgctttatataaaatgggaaattctgaaaatacttctagatgaggcactatggcaatattactcattcagaaaggttgaactttttaaggagctttttcttctttgattttatgttatttataaaggatttaaggtaccttttagtgtttcatgttctttgtttggaattctggacgtgatttcctgtggaaacacttgcaggtgtttgggtctacaatgccaaccctctaatgactcattcatctctggttgccacaacagcactgaactaatttttctatggaaaaattcaaatatgccttcatatagggcagtcaggaatacttgtgaccttattttgtaatggaaattaaaaaggactgatgataggtgggatcaggagtagagatgctctttaagggcaggagagtattactattgggaaaggtacagcttatagcagtgaagatttacaattcttcttccagtacctcttggcagaaaatactgtggtatccagaccccattctgaatctgatttgatttatttcttgggctagaagagaataaacatgtagttaggagcatttctaggcagtaataggttgaagagacaggtagagtggaatctcaagaggagagagggaaggaaggagatttcttcggtcacataatattctagttctggctcaagatattttatttacatatatatgtatatcttctgagttggatgcatgcacacatatgttgagctcgtataaatcaaaagctgtctgtacatcattttggtatcttgtcaacctcacaaaaactagtatcaatgaatgttatgaaatttcacaattcattagagaaaaatgaagtttaaatggtaagaatataaactcttaagttaatatgcttaataattaagaacttttgccttggagtagatgaagaaacccaagaattatatattaatttaacgaagagaaaaatatctatttaaagaattgaccattttctaaaattccagarcaacagtgcacataattggatgctcataacaacacagaaaaggatgctcagtctgtgaagttcagtctcaaccagttttgcattttatcttcatctttaatatcaggatagatattataacttaatgctttggtattttcctcaatatttcctttgggagactgaattttttcatagataaaagggaggtatacagatacgttcaatcctatttaccagaatgagtttttggctcatctttcatattgttttactgactgctatgaagaattgtcctcctcctcttttatttcatagaacatttctttttctttcttctctttttcttcttctcctttttctccttctcccctccccctccttctttttctccttctcctccttattctcctcctcctccccctcctacaacttcttttccttcctcctcctcttcttcttccccttccccttcctcctcctcctcctcctcctcttcttctttcttctgaaatggcgtcactcggttgcccaggctgcagtgccttagcacaatcatagctcactgcagcctcaagctcttaaggctcaagggatcctcccacctcagcctcctgagtagctgggaccacaggtgtgcaccactgtgtctggctcctattacacagaacattttacttggttttctcactgattttgtgatgttgtcctaattmcatagcgctggcacaaagattatataagcagtagggtactttgtggactcacgtgtggccaggtttgtcccaggatcttcaccctttcactcccttacttgtgactcaccccagcctatacagtgggaagaaattgaggtggagttgaagggattcatagaggtaatgaccccttggattgctggggagggctgtggcaacatcctccacccaccgccacctcaggtaaaggaagcagaggtgagaggaggctcttctaacacgtcctttaagccaaccaaggagttggctgcaaggatactactaggagacagtgagggaacatagaataagaggaaactggccttcttgtccccagctggagacttttggaagtacagaagccctttgcctttcctggggctgccagggagtacagaatcgggagtgaaactgatcctgagcgagtgcacagtgctccttgatgattactcctccgcaaattcagagactggcgcttactgcttatctggggaattctgaaggcaagggggcagctggaacagccataacgacagcaaaatgagggggtgtccgagagtagcctrctttttttaatcctgtggcatggaaaggatgtgtgactttcccacagatgaagaggatgctgtgaaaggtaaaagctcccttaaaagtttcttgcttcaaaggtggcttgctaaggcaagagaacaccctagtagtaggttgggatgggaggagatatatcattaagaataggtaagggagaatgtcaagaggcgagcacaagcgtgtgcttgccaagcttctaaagaaacttcctgtgtaccccactgaagtgctaggatttggatgtctgaccaacccagaggtcactgatggccagccagtattaaccaagggagggctaaaatgcagagtaattgaagccaacaacaaaacatgcacctttcctttagtcttctcttcctctgttctgaccttagagaaaccagaagagtggggtaaggataggaaggaaaagagaaggaacagtccagtttcttctccaccactgcagccctgagttaggggagtagaagagaagctttgaattggatatgaaattaaattttgatttagactggaccagatacctttaatccctgcatggrtgccatcattgatggaatggggcttctttgtatacctgagagaatggggcagctatgggatctgcctgagacaaggactgagagatgcatatccaacaaagcatgcttaaaagcagtgattggagagaagtaaagccatttcctgctaagttcagactgttcagtcaattgattatactgagagagattatgcagtaaagttatttagctgackggtaaagagtctctttggggatggtgtgcccagcgcacaaggttaaggagttggaagatttcttctgtgaataaaatcaatgtttggggctcagtctatcgggaatgacttattactagtactaaaatttgtgtgtgtgagatttaataagtctttaatatggtcttcatttgttgcttcatttattcaaacatttattaattgcctctgtcttacacatagaaaaaaacctaatgctaaggctgttgtcactgcgctcaaggagaagaggaaaataacagtaatttatacctgctagtatgtgctaggaactattttaagtgtgttatgcacacaaatctaatgtaattaatccaaaaggtagttgcttttataattgtttaataatgaataaaactgtattgcaaaaaggttaagtaatttgcctaagattatgtagctagtaagagttgaggctggaatttgagcccaggaactcatgctatgctgcttctcataatataaggtatttcctctaatacagaatttaatttagactgtgactaagtttaaagacaagattacaaggagaaggattaatgtgacctgaaaacattggataagacttcagactcatatgttccaatgctcctggaaggccaaccataaatggaaggtgtatytttaggacctggaatgaaagggcacggtagtatcatttcagagtttcagctgtttgtaatatttattataatatcttttttggtcttatcacccagagacatgttctttgcaataaaatagacagcttaatagatttctttaatattatttggagcagacatcataatttcatttagactttaagccttaggagatatctatatatgtatctataacatctgtatctatattatctaacaacgtctgtatctatttgtatttatatctgataatattggtgggtcatttgtagagttgtccttgaattctggaacaaatctcttctgatgcattctgtaaaatatgaggaaaaagcctttaactctttcatatcccaatttgggccaagggaagtcatagctatagaaaaatgacaccctcaataaacaggaacaattagaaggctattgcttgttgtattttgggaacagctttcgaatgctggctttgtggcacctcttaccccagaataatgtggtattatcttatatatgaagaatttagcattctagctgctgagaactcaacatttctaagatgctgagattatgtatcctatcacttccagaaacagtttttggaagaaagagagtctaggcctacagcttcttaggaaggcttaacacagggtttttagttgtgctattgtggctcctaggcaaagtgcagaaatgagagagccagtacctgagtcctaaacctccttctgacaacaatcctcttcatgaccctgggaagggcaatcmactttccggaacctttttatcacatatgaaattaaggggtttggactagatatctaggattctttcctggtctaacatttgatgtatttctctatggttcaaagcataacctaatggggaagtttatgacattctaacatggcatactgggttaggagtggatgttaaaatatttatttataccactctttcatcagtaaatacagaaaaaactggtgtgaaacttaccagtagggcaagaagttgattacctctcttgttttgatctcttttattacatgtctttgttttgcaggcctctacacttcagtgccctccttgacctagtaataaactctcctccacactgaagccttcactgaaaacttcggaatagaagttggcataaagtatagtaattaygactttcgtggactgaygtgtatgttaaggacttcaaagcatcctactattcagatgtgtggactgtgctaaagtagaagaatctataaaaccaaaggaaaacaaaagtgacaaaactggaggagttttatttttatggagwcagatgggcaaagtaaggtaggttgaatgccacttcagttctaaaagtctatttattttctcttggtctgactggaagtgccatctatatagcccaacattttcaagagaaggatgacgatgaaggcttccatggcaaaataatgagaaaattgtcaaattgtcaaaaatcaagctttaggattcaacctttgacactcatgattcatgatatgctttctttactcagcagtggtgtgtgttactttaaatgtttagaaaacatacatgtgcatgtatctttatagcagcatgatttatagtcctttgggtatatacccagtaatgggatggctgggtcaaatggtatgtctagttctagatccctgaggaatcgccacrctgacttccacaatggttgaactastttacagtcccaccaacagtgtaaaagtgttcctatttctccacatcctctccagcacctgttgtttcctgactttttaatgattgccattctaactggtgtgagatggtatctcattgtggttttgatttggatttctctgatggccagtgatggtgagcattttttcatgtgtcttttggctgcataaatgtcttcttttgagaagtgtctgttcatatccttcacccactttttgatggggttgtttgtttttttcttgtaaatttgtttaagttgattgtagattctggatattagccctttgtcagatgagtaggttgcaaaaattttctcccattctgtaggttgcctgttcactctgatggtagtttcttttgctgtgcagatgtgcagaagctctttagtttaattmratcccatttgtcaattttggtttttgttgccattgcttttggtgttttagacatgaagtccttgcccatgcctatgtcctgaatggtaatgcctaggtttccttctagggtttttatggttttaggtctaacatttaagtctttaatccatcttgaattaatttttgtataaggtgtaaggaagggatccagtttcagctttctatatatggctagccagttttcccagcaccatttattaaatagggaatcctttccccattgcttgtttttctcaggtttgtcaaagacacgtatgtttattgcggcactattcacaatagcaaagacttggaaccaacccaaatgtccaacaatgatagactggattaagaaaatgtggcacatatacaccatggaatactatgcagccataaaaaaggatgagttcatgtcctttgtagggacatggatgaaattggaaatcatcattctcagtaaactatcacaaggacaaaaaaccaaacaccrtatgttctcactcataggtgggaattgaacaatgagaacacatggacacaggaaggggaacatcacactctggggactgttgtggggtagggggaggggggagggatagcattaggagatatacgtaatgctaaatgatgagctaatgggtgcagcacaccagcatggcacatgtatacatatgaaactaacctgcacattgtgcacatgtaccctaaaacttaaagtataataataataataataataataataaatgtttagaaaaaaattctatcataaatatgaccatttaatttcctacaagtttttcaaaagtttcttcttgggtttattcatccctatggaaaattccttagagagatttargaatcttcagtgaatacttttagaacaaatggaaagaaagcaaaaatgctgtttcatcattgagaaaaataaaactcaaaacaagcttaaccatcaaacctcttctttattccaatttgtcatatttgtaatagcaacaataagctsttcttagaaataatgtgttcttagaaataaataaaatgcatgtttcttactgctaaatgccagtgtacaatgaaatttccaagccaattttttggggaaaaggtgtaacttctgtataatgtatttaggatcttaagtggcatatttctgttggatggtttatatgttatctatagatagcacctcactactaaggcataataaagaaacttgtgctcaaagaggagggataaaataaaaatagaatttgatttcaacaagtggatttgatcatttgcaaaatggtgataacaatcctttctctaactcacagcattgtcatattattagttaattataatgttaatagtactaatattcatcatctcagtgttcccaagagggtcccaaggaggtcatactaacttcacttcttatattttccagtttgttagcttacaagttgtaactgcagagtcttagcttcacattcaccttcccccaccatttctcctcaggtgtgccctagtgtgaactaaatctgtcactctttttctgttcttttccttaaggggtgctgccatgagaacgcagatcccctacttctctgaaaagtgcagtgacattcccactgctgtgttgttcccccttagtttcttcagacacatctacaattttccttcctcccagaactgggaaaagctctttttctttgcatggactttttcacctgagtttgaaagcaccgggcatggttgtgcctttaagtttcacaatgctcttcataaaagtggtctgaacttcagcatttctttttttttccctgagatggagacttgctctgtcactcaggctgcagtgcggtggcacgatctcagctcactgcaacctccgcctcctgggttgaagcaattctcctgtctcagactcctgagtagctgggattacaggcgcccaccacacccggctaatttttgtatttttagtagagatgaggtttcaccatgttggtcaggctggtcttgaattcctgacctcgtgatctgcccacctcggcctctcaaagtgctggtattacaggcgtgagccaccgtgcctggcctgaacttcagcttttacttgtagtctctctctctctgtgtgagaatgagcccttgttttgctaagccagcctggagaatacatcccattccaccctccatttttttttttatcatccttcttcctttgtttcttcctcaagtctctcttttctcctttacaaaacacacacacacacacacacacacacacacacacacacacggacaagagcaacaaaccaagtatatccacccacaaaaaaaccctccaaacatcattaattcatggaaatagatggggagagacaagactgtcggccccacaccagcaatcactgactcagtctaaacaaagagtaacataataatggtatacaacagagaatcaccgtttaaattttatgaccaggtctttaataagtatcttgcagcctgttatagaaaaacactttcaaatagtgtgatatgtctcataatgggaaaagcgtcccccrgaagtactgagcatccagcaataaaggcatttaagtagacatatcatatgatcaactttaagaggcagtttccaacatgtgttgtcttcattgccggattggaagaaacccgggggcaacgtatcatttatttagcrtaacattgtattttgcataatactagagtttctaaagaattttcatatatactaagctattttaatccttgcaagcaycctgtgaaataaagcaaggactctgcttatttaataaataaggaaagaggctcagcatgattcataaattttcctggagtttcaggactggcaaatagcagaattggagtgtgatgccagccaattatatccttaaactttacatatattgcccagtgtaaaagttcaagaatgcttatttctttgttatctggaaagggctgctgtaaaagcaaacctaagtgagactgtttgatcgtccatgcctgccccaaagttccaagaagttttgaatcacgtaaaaacaatcagaaaaccctgttggttttattcctttttttcctccatcccagctggactgaaatatgtaaaatctatgggatttcatgtcataccaactgtgcaaattagtggcacaatagattgtgagtttcttcagggcaggaacctttcatcttaatatttcccccttatgctgcatagtattgacttaaatacacacacacacacacacacacacacacacacacacttaaagaaatggatagatggagagatggatggataggtgggtaggtggaggtgaccagggaccctaaagtctgtgactcaaggatctaggcccagttcttaaagactcatattgcagctgattttttaagaatctccccaactttctcgctaccattcgacagagagagagacattctgctacattttttctcctgggtggcctataacggttcacattcaccagttcttgtaacttgtttttcactcaaacccagcttgctgttagtctgctgtgtctaaatagtcatggatcctgcacctgctctaagacaggctgttaagtgaggcttcctttcggagactgcaaattcaggactccaggcccctcagaatggttgtttcatgatttatagctggaggtgtgtacttctgtgtgctgttggtcaatgatgataaagtaggtatcagtgcctctgtgaattttctgttgccctttcataaccaccatttaggagcatttaatcaggaataaagtgctaggggtgggaaaaccatttcaggttgccattgcactgtggaggcaattgtggacttttcccccccatattttctaaactactaaaaatagtgtttcacatttacctgcataattttatgtctgctctttccctgcttgagcagataacatgatgacagcttctctgacccctaattttccttttattttcaactttgaccatggagacatgttaagccccaaggaagcactcatttttactatcaacaggtatagttgcccccttaactggtcataatgtctgctaaatagcatcaggccctagtaatccaggaggcaatccacattcccttactgaaacagagaaggggaagattcaagatggaggggatattgaatagttgaatgtcatgcctaagtattcttacacgtttacaggtttagtatgctgtggatattgatgcttataaatctcaagattttggcagttctcaaagtacagtctctatcaccagtagtatccgtatcacctgggaacttgctaaaaatgcaaatttgtatccacccccatccccaatctactgaaccagaaaatctggcggcagggccagcaatctgtgcatttgcacagatgattctgatgctcactaaaaattgagaaccactggttttaggaagtttacaaaagactgaacctttttctttctgtctttttaaaacattggtgtggacaaattaaattgtcccttttctgaacagcatttaatcatactgaacaattattcataccttttcttaagcatatgttaatcatattagaaatgccattcccttctcgtgcaaaagggcaaaatcagcaacatccttccaatgtgggtgggtaaatgaaggctctgatacaagaattgaaatgaaatatgtgtgcaaacagttcttagtactgagctgtttaaagaaggcctacctttgcacagaaaatgtctataagaattactcattaatgccacttaatagaggaagagtaggagataacgtgggaacagggtctttttaaaaaataccactttaaagaagaggcttatgcttcatcatagacaaaatgctttgtatagtactaacaggggcatatctattcctttaatgacactctaagccagtgctttaaaattttattgttgtttttattgcccctggaattccatttatctatgatagtgttggattaatgtgtggtaagcacattgccacatcagtccatgattaattagccgacatttattgagtacttaatatttgacccaaactggatcaaaactggggaatatagaaactgtcgtctctgctaacaagtttgcaatctagttggagagatgggagtaaaactcctgaaaaacttgggctcaataagataacatgatcaagagtgaggagacatgatatagactgcaaatgcagggaaagtgcactttgtggagtggtcactccagtgtttagtatgtcagaaaggaggcttcatggggcagacggatctcaaaggatgcctaagttcagcagtggattgtttgcagaaatggcctaattcttcccctgcttgtatctctgctctttggcattgcaacttttcaggtccttatgtgaagaggtagagtctactcctctgcccctggccttgtaatggtggcaatgttgacgtgctaattctgattctagacctcaagagacctcgcacatctccggccactctattgaaacacaaccagctgccatgaacaggcccaggttaagtctgctggaggaagagaccacattctttatgagatgagatgtttcagcagaagccatgggagactagatagcccccagcagagccatcaatgaggtcaacagaagaactccaccctagctgaacccagtccaaattgccaacttgcagaatcttgggctaaatgaaccaacaggtcaccaaatgttgaagtggtttgtcatatagtgacagataactgatacaaatctggaaggtagagaggaagaaagtgttctaggccagagttgtacctcccaaaaagtcgagtcagaaatatgggaggccaggctaaagaaaagtaaagaaattagtaggattggatgtttgaaccactttctttcagtaaatcgctagaagcacccatgcagggttcaagtgaacgtatactggaggccagacctgcccaactatgctgctaaatggtgatcttctcctgaagcgctccatcagggtatgagtaacagggaactccccttgccaagacacacagggagtgtgatgaccctgtccctccaaactgcactttgagagaatggaaccttgttttgtagccaactatattatgccaagaacaaaaagatctttgtagcttatcatctgtttttatgttttatataaaaatctaaagcttctatgacatactttcaagaaactgctagaggcaacacgtagaatcccagagtaaagatattatgaagttagagtactttaaaattcttcagttctcacagtgtggatctatcgcccattgaataacaactttaactgttttatgaggtcactgaatatatttttcactataaaagaacatgagagaaaatatttaccttgaaatgctaaaaatgtgttccctttctgtggaatggcatttgttgaaaggaatatcccgggagaggatggattcttgttttagacatagctctttaaatttggcaggacatgtgggggtagggggacagatgggggtggagttgggggagcttggtattcaggtggcacaataccaggtggaggttaaatacctacaactccttatgcctgggatcttttgttccaatagccatagaagcttctttcatttcactttttatttttattttttgcaaaacccattagttgacaaagtgccataaactttgtacaaaatggcctcgttcagcaaatattttattcaaactatgctcctatcagcagtaccacacatgtcataaagtcatggtgaagcaggaatttcagtaaaagaaaaggcgggggtcatgaagaccgaaggatcaaaggagcatggagtagaggaggcgtcacatctgaagtgcacactgtgtgtgcgcgctgcaaggagagagagcgttataaagttgttgttttaatcgctgcttgtcgcctgcgaacatgttgctcccttttaagtgtcaagcaacgggttcacccaaaacttttctgcaccgaggacccgcacgcccggggtcccacctgcccctctctgcctgcctcccaccggcgcctgggcatcctgcgccggctacaggtccttgctcactgaagcgtcacctctcactccccagtaagcctccgcagcccactcggactgcagcctgtttgccgcccgtcctcccattgcagcactcggggcgacagagagggaggaggcgcgcggggacggggacgcccaggaggacccactcgcgggtcccgctccgctccggcagcagcatggggaaaggacgcgcgggccgagttggcaccacaggtaaacaggctggcgaggcgcaggacgctgtcgccgccgcggccacccagcgatttccaggcacgcaactccgcctccagggctctctccctcgcgctctctcccagccgcttgctcgcagccccagcagccgccgcagcatcacttcacacaaaggactgtcacccgcggagcagctcctccacctccacgtcctcctccggtgacagcagccccgacagcagggctcgggcgcggcggcggcgcggggggtggggggacctgtcactccctgtaactgaggcggcggcagcggtttttttgccttttctattttgccttttttttttttgcccttatacctcttcgcctttctgtggttccatccacttcttccccctcctcctcccataaacaactctcctacccctgcacccccaataaataaataaaaggaggagggcaaggggggaggaggaggagtggtgctgcgaggggaaggaaaagggaggcagcgcgagagagccgggcagagtccgaaccgacagccagaagcccgcacgcacctcgcaccatgagatggcgacgcgccccgcgccgctccgggcgtcccggcccccgggcccagcgccccggctccgccgcccgctcgtcgccgccgctgccgctgctgccactactgctgctgctggggaccgcggccctggcgccgggggcggcggccggcaacgaggcggctcccgcgggggcctcggtgtgctactcgtccccgcccagcgtgggatcggtgcaggagctagctcagcgcgccgcggtggtgatcgagggaaaggtgcacccgcagcggcggcagcagggggcactcgacaggaaggcggcggcggcggcgggcgaggcaggggcgtggggcggcgatcgcgagccgccagccgcgggcccacgggcgctggggccgcccgccgaggagccgctgctcgccgccaacgggaccgtgccctcttggcccaccgccccggtgcccagcgccggcgagcccggggaggaggcgccctatctggtgaaggtgcaccaggtgtgggcggtgaaagccgggggcttgaagaaggactcgctgctcaccgtgcgcctggggacctggggccaccccgccttcccctcctgcgggaggctcaaggaggacagcaggtacatcttcttcatggagcccgacgccaacagcaccagccgcgcgccggccgccttccgagcctctttcccccctctggagacgggccggaacctcaagaaggaggtcagccgggtgctgtgcaagcggtgcggtaagttcctcgcccttgggggcgcgaacccgcggcgaggagggcgcatcccgggcgcgcgggcagcggggctcgacggccgcccgagcaaggcagaggcgctctgggtcccagttgttggtttcagggtggtgggttctcagcgatcctcagagagggaggtttcgctttctccagcttcccttgtcttaggctttgccactggagaaagcccaagtttagtcctgggttggggcctcctgaaactttttaatcctttggggtttggctcaccaagtagatcggaaatgtgccggctgctttcttgtgggtgatatgaacttggctttggttaggagttgctgattctgggcctcctttgaaggaggaagggtgagtcccgcaggattttaacgccttcccttcacttggagtccagagtgtggagatggttaggggtttgcttctgtgtctgtgaagtctctgcaaggaaggggcagtgcactgacattccccgacagatgtggcagagttttttggcaactcaatgtccagcagagaggtgcagtctgtaccttgtgaatatgtgtaatatgtgagaattataaagttgttattggtgggggtttttttttttggccaagtcatctcaagaaattttgttttcacaatattttggtttggaggatgtttttgcacttcactgcatcagaacagatgaacgaaattatggaatatcacatgtaggccctgaagaagaagaattttggaagtttagcaattatttgctacaccttttcccacttaccactgaaaagtattcttcccgggtctgcttcatatgatcaggtttgagaaattagctgattatctcatttcgttgctgaggtagcattatgtttatgccattcataaactaatttctatgatctaaatatctgtataatttcctgattactatataatcactaacacatagcggggtttcttctcaaacagtaaattaacacgattacacatcacaaattccaacatgcataatagcttttccccctggtctttatgtatccgtctaatagacgtttgggttaattgaatttttataaaactcagcaccatgccaagcagagtctgcctgtgatggagagtgtgtcagttcttttaaatttgtgtctggtgggggccaattatttaaatttctggttggcatttgtggtggttaagtcctgctgttaattaatacctgatgatttggttttaatgacagcaaagatcattgttcacccaccattcccttatctgaacaatgtactttgtatgccagagacctgttaggattgcaccactcagtggacagaagctgttcagagagtggtgctgaagaaagctaagtggcatagggattccccgagacccactgatagatgtcactccaaagcatgggaaatgctctgctgggagctgtcttattaggcaaccgaaaagctcagcaccatcgtactgcagcatatgttactctgttacagaatctgaaacaaaaccttttaagcaacaccactgtccagttttcatatgttttatagtgtgtaattcaggaaggatttttcctttatcccaagtcatgagttttgaatcattcacaccacatggtgggaagttaatataaaggggattgtagttagctgtgatgcctaggattgggggtgcattactacattatcaattgtgttagttataccttttaactagaaataaatgtaagacttgagaggtaaagttcttacaagcatccagagaatgtttggaaatggaaaactcatgttgtttggaggaatcatattctattcttgtgcttctaaggggaaaaaacttcattgaaggtacttagttttgtccctcagtttgccagtcaaaagaaatataatacatagttgtaagttgtggcacgttttaaaaaaatgggtttttaatgagctggagatctttttgcatgtaatcgagtatgttaagaaatcacaaagttactgccctggatttctgtagctattgtgtgtgcttggcgatttttgtgttatatgatttaaagtaggatattgcttttaacctcaaatagatttagctaagttctaactgaaatcatgctaaaagtttctcctcgcatttttacaaacatagtgtttcttgtaaaactggaggataaaagcaaataatatcagctattttatatgatgtaaattcagtaaatctgcacttggaatattgagtgtaaaagtgtgtgtgtgtgtgtgtgtgagagagagaatgaatgaatgtgtgaattcatccagttgtgtggtgtcagataatgccattcagaatttgccaggcaaagaaacacagaaaaatggaaaagagagagagagagagaactagcaagaggaaagaatgagaatgagaatgggggctgatttgttctggttgagctgcttctggtcagaagatttcagggagagtgatggagcagaaggccctcacctaacatgaagctgccctgggggcgtgatggttgtgtgcaggcttgagccataatgctaggctggagaaggaatagagcaaagtcattttgtgatatcatacccaggggaacagtttccagctctgctgctctcagctgctgtgttgtttcctacaagttgtttgctagtgtagaaactacacatgcaacagattagccttagggttgagttaataaaaatctttcctcttgaaattcctttttctctttccccctcatctaatataaactccggaataatgtcgataaaacaagaagctctttgaaaaatggacctttggaaacagaaactatgagtgtattttagaagacaacatggaaattcatagcttaattgctttgtagttgaagtttgtataaatgacacttcctttacagttatttaaagtgtttgtagtcttcactttttctgttgctcactgaacgacctaagaaatatccttgggttttatgttcattggaatgcaggataatttgctgtccgattaaatctctattattcaaacaagtcattgtttgatgtgctacacttttagcttccaaagcattgtggttatatgaggcagaagctgatttccaaaaaggagtacaaacactgaggttgaataacatctacaattgggctatgccagatttgtacatcaattctgatcttacaagccaatataagtattttatatcatatgatggtagaatgaagatgtatacatgtatgcatgtattgataatgtaaacatctttatcaaatatttatgatacatagcacttgctctttttaatatcttcagtcactatttaataaagtgtgctaaccttatggtgttttgaaaatgaaagaaaatgctgcagagattttccagtcagcattaaagaaaactattcttaataaaagctatattaaggaaatagaaacagtaacagatatagcctgactgcttgtatgttgtaaatacacatgtaaatttaatttcccaagtgtttgtgactgctctttttaaactttataaatcttgctgtcaaaaatctataccggatttaaaatagctacttctactgagtagagaaactatgtatttatttatatgtatgttaaaaatgaaaccaacataggtcatttgggagaagaactccttagaataaaaatattttaaaaagtggatttaaatatctgagttagaatatttcactagcactaggggatcgttcttgttgttgtggggtatctataaatcctctgaatgtaggraaagtcttaccatatgtcctgatgtattaagtaagactaggagctttagacaacagagaattaaaacagtgagctgtacttcctctggcttgtatatttatagcaaatgagagcaaaagatgtgattgggcgggttattgcccttgtcaaatataatctattcattcttccggaaatctcctttgcttcgatacctattttcttcctgtttttttttcttaattataaacataatgtcttttacaaccctcttgtacatttcaatgacaatttatgaactgcttagatatccaaagatctctaaatcctcatagcaatacttagccttttatttgttttaaatatggttgaatgatctgaaaaaataatctcttttgatagctcttaatgaatgggtattttgattagctttgtatagataaatgataatgaaaacaaaaagtatacaattagggttcttactgattcaagcaatttgttaccaccccaaaatagtgcaacatggcttagtgaaagtcttcataagaaagtaaaaactaatttacaatgttcttatttcctaatcacagaaatgggcattgtggacagttttcaaccaatatatgaatactctaaatttgtgcatacatattgttactccgcttttatgttataacatgtaagttaaaattactattatgaaagaatatataacctggctagtttacccccaacctctccagaatatcagtcgctttatagtacttgaacgtttgcttagtgacacattctgttgaaatctaatgttgaattatttgtggatttacagaatatacaaattcacaaataattgtatgactaagacaaaacttggtcattttaagttgagggattgtcctagttgagaggttgtgttttcatattgcctaagttgttgagtgctgtagtgcacttcaagtaaatctgtttctgaagacttgccccctggattttcgtccctaaattatccatacaggttgaagcagataaaatacaagaaattttggtgaagttgaaggttaaaaatagattgactagtctcttcttggcatagatacaattattaggaaacagttctccctaatacagacttgccatccaggcatcctagagagagatgcatatgtggtaatttacattaatttttggtcttcttcaggagaaccaggatatttttccctacggaaaatagtttgttaggaagttctttcctggcccttgatttacctcatttggacctagtaaaatttatactttgttttaaattacaactaaaaaatcaaaaagaagaaatgttacctacagtctggatggaccgtaagagactgtcctactactttctaactcagacttctgtgttttttcttttcttcttctttatttcccctatgaagatactacaggggaagccttgggtaaatgatggggcccaggagtggattgtagtgtatgagtttaggattgctagtcattatcatatggactagccttctctcgaaaccttgaaattcagctgtccgggtccaaggaatgttggaaaatagaggtcttagatcacaagactgtgaatgcaaatggtctttctgtttctgatggagtctttgtccatcccatgaggacgtggatggtaacctgcattgcatctctagttcagaggctttctctccaaagcccaaggctctgtctttggacatctgccctggcttgctgggaacaagaaaacagctctgagtggtgcatgaatccggagctagtagccaggtttatgaggtagcaatggtccaagggaacctagaggagggaattgtttccttttcttttgctctgctgtgctagaatatgtgagctgaatcaagcccagtgcaagggaacatacctgatgagggcactagagtcttggtactgggtatacctaagagcccaggggatggacgagggataagaaatgtgaagtactgtcagcttcactaaatttggaaaatgcataccagtaatactatcatcccaaatggttgtcttttatctgggaattgccattaaggcaaagatagctaaaaaaattgagggcatactaaaaccacatagttataactaccacttatggagttggtaaatttttttggcctctttgatagacacatagagtttgatttttatgtgtagattaaattcctgttgaataattaatgaataaatgactgaaggaccccagctggttggatagtggaaatcactgttctagcctaaatttagaaagataaaaacatacttttgatttttttctcttctcatctctgatatggtgagtttgataccaggacactgttcccttctcttcccatccagagccttactgtaatctggatcgacctttggggcttcagagaaaggttgtttaatttcccaaaacttttccctcacttatttttagaacaatatttgttctgtgtagcttatagcccagcaggaaaaaaaaattccagtgttgtaaatgcttaaaagtacagaagagttttgctgtagtctatgaacccttaccactgttttcagcagaaccatttgtaaaccatcccagtttattttgggtgacagacttcagtattcagaaattttgtgttctccttggatctctcttcacaggtgtttaaccatctcagtactgtaagtgatactttatgttgaaattcattctcataactgaagatggaaaaacacagcttatatccctaagaagtaatacaaagaggttttagatcagttcctctttacttatttttcttgtttccaatatcacaacagctcttggtttacctgcaggtggggtggcatgtgcccatttgggctctgatgaataatgaggttctttgccttcacttcctcagtcggccctggaggcactgtgggagatgatgtgttatcagtgaagcagcagatgtggtggcagcattttcctccactgcagggagcatcccgtctgtacctctgtacagagcaggggagctgtctactgagaaggaaatggatggctgtgtttgcttcacatagaatttctcattagccttgggaagtggttctggcagttggggccccttggtggttgccaggatggagaggttctgctcagagtgggtgtgctcattgtcctgtcatctgcacaaagggccacagcattgagataacctaggcatgctgctgctttgcaagcccggacacctccggacaatcctttcctctgttgtcttcattcccatccatagagatgggtcacatcttgtcctcaggaacactagcacctttctttttgttggagcagaaattttataaaacaccctagcattttggaatatagttttattccgatgagcagtttagaaaaatttatggtaacataaaatttaccattttaaccatttttaggtgtgcagttcagtggcattaagtatttgcattgttgtgtaaccctcactgcaatccatctccagatattttatcttcccaaagtggaaactctgtattcattaaacactaactccccattccctttcctccttttccccaatcaccattctactttctgtctttacaaatttgactaccctttttttttttttttttttttttttttgagacggagtttcgctctgtcgcccaggctggagtgctgtggcgcgatctcgactcactgcaagctccgcctcccgggttcacgccattctcctgcctcagcctcccgtgtagctgggactacaggcgcgcgccaccatgcccggctaatttttgtatttttagtagagacggggtttcaccgtgttagccaggatggtctagatctcctgaccttgtgatccgcccgtctcggcctcccaaagtgctgggattacaggcgtgagccaccgcgcccggccctacctttcttaagtgtagagttcagcagtattcaatacattcgtaatgttgtacaactatcaccatcatccatcgccatactcttgaccttgtaaaaccaagactctataccaattaaattacaacttctcattttctcctcccccagccactgacaaacactattctactgtttgcctctctgatttttactaagtgcatcatttaagtggaatcatatggtatttgtccttttgtgactggcttatttcacttaccataatgtcctcaaggttcatcatgttgtagcatatgtcagaatttccttcttttgaaaggctcaataattttccattgtatgtaaataacacattttgtttattcatccatccatccatcagtggacacctggtttactttcacattttggctattataaataatgctgctgtgaaatgtcttctcaaatccctgctttcaattttttgggtatatacacagaagcagaattgctgaaacatatggtaattcttttttctttttttcttttcttttttttttttttgagatggcatctcactgtgtcgcccaggctggagtgcagtggcacgatcttggctcactgcaacctccacctcctgagttcaagtgattctcctgcctcagcctcctgaatagctgggagtacaggtgcatgccaccatgcctaagttttgtatttttagtaaaaatggggtttcaccatgttggccaggcaggtcttgaactcctgacctcaggtgatccgcctgcctcggcctcccaaaatgctggattacaggagtgagccatggtgcccggcctcatatggtagttctaggtttgctttttggaggagctatcatactgttttccatagcagctgcaccattttacattcccaccagcagtaaacaagggttccagtttttccacatcctccctcacacatgctattttctactgttttgatactagccttcctaatgcacgtggagtagtggtgagcagtttttatattgttgttgttttctatacagagttagtgtctctaattacactgtcattaacaagaagcaaaagttctcagaaaagagaggtgttcatttattcaactcttagtttaaatagcatgtaagatcctgaatctgaaaccatgaaataaggaaattacaatggataacagcttaataaaaacaatgatttaaagagtaagcttagaaataaagaattgagtaagcttcgatttaaagaataagcttagaaataaaaacaatgaaagatgtaaagaataagcttagagaatggacttacagaaaacagtcctccaaggtcatcatgagaatattgtatttttattcatattgctatcagtgtagtccagaaaggaaccttatcatactttgattagtttcagaaccttttaattgatttaatgtattcattaattgcctctaccccagcaatttccctgtctgtattcctgtccattgccccaatccccttctaatcagtacgcaccagaggctgagtcattctaaaatactacttttttttttgtttgtttcagacagggtcttgctctgtcatccaggcgggagtgcagtgggacgatcttggctcactgcagcctcaacctcatggactcaagcagtcctccacttcagcctcccaagtagctggtatcacaggcccatgccactatgcccagctaatttttgtattttttgtagagatggggttttgccatgttgcccaggctggtcttgaactcctaagctcaagcaatgctcccacctcagcctcccaaagtgctgggattacaagcatgagccactgcacttggcctgaaatgctacttttcttaggccttgttccctacttagaaagtttcaatggatgcaccatagttaactcaagatctcaacattcaatatcctccttagcctcaataaagccttatctttctcaccttcccatatgaacacttcatccactctgactgctccctgaacaggccaggcactttcctaaccctcctgtttttacatatgccatttcctctgcctcgatcttcttccaccctcatttctacctgtggaatttctgttcttccttctagggacagctcaaatcctactgcttccataatgaaactagtaatgattcctaccagggatatgcactctagaatttgaacacagagctcctctttcctgtgtaccttacacaaggtactgttacaaattttccttctgtcatattgtgtttgttacaatgtatgtattttaaaatttttctctgtttctgtgtgtcttgcctcactggcagccaacactattcttgtgtttggatactagcagggtcttcagcttacttgccagtgaaaagtgccctggcctcgagtcagaagaatcctttccactttcagctttgtagttagtacctgtgtgattgtgggtcgctgactttattcactcatttgggtctcagtttcctaatatgcaaaacgagaaggtaaaatgcttttcaaggtccgtttaaactgtatttggtcctcagaaatgacccaaacatagaaatctccttcttctggagctttttctggagcttattttctcttcctctcctcttatttagtgttgttctcaggagaacacatgtgggaaaacaactgtgaaacttttagacactctaagagaggagaaagagagctgaatgagagggaaccttcaagggaaggtgtctcttttctccaaatcttatctccatggcctttttgtgtcatttaaaaaaatattaacagttatttgcattcgctggcatcgtcttttcaaaaagcaaatatgattgcctctgcaagcctgtctttgaaatgataaagtatgattaatccacagctgtattctttagaatgagaaagttcagtcatttgtggtgctaaaatgaaaaaataaagatttgaatggttttactatttactgtgaatttatttttacaatgtagatggggcattgttttaggttctaataattagcactgttgctgaaatggatgaggtcagcacagagagtgtggagagcttggttttcaggggggtggcagcagttctaatggctgcagggcgaggcttcctgctgagatgccagtgttgggttctttctcaaattatgatttttatggtttgggcaagaaaaggatgcatttaagctcttttataagtaaaatgagcaatgctgaaacagttgtcaaatgggaataatttgatctgacttttacaatttctgcatgaagaggtattggcagctccatggcattggggcaggatgggcagggcttagctgggctaggtccattttttttttccttcagtttaacgtctccgacccctggtggattcacctactgcagaagagccaatgctgcttataaattatgtttcctcaatctatatctctagcccagacctttctttttggctctctatctgaacatctaactacttacctggtaacttatgtcctacaaacactttatgtgaaatattttaaccagtgcctcatctccactgccagtccctctgcacatttgtatcctaataatgactctaccctcactgctagtatgatcaccacagttattcccagtgacttccttggtcgacacttatttggtgccagagtagtaggcgctgagataaattcagttaacccctcaccatatggcagcattaatattttttagttacctcaaaccagatacctctcctgctccataccagattagtgaccacatcccactgattctacgtccttaacaaatctcagattcgtcccgtcttccctcacttcaacttctctgtaatagattcttactgcaactgtaacagcctctttatgcatggattctttccttctcacatccattttctatactgttgctagagtggtctttctaaaatagaatagatggtactgtgcttttacctaaagcttttcggttgacatcaggataaaactcagacccctttgaatggcatgtgagggcttttggcttttgtcccaagtgttcttgtccagttctttctcctatccagaaccttgtgctacactgatggcattctctacatatgccaggcagctttagggctctgtggatttgcacatattgttctcttttcccagaatggtctgcttctctatctacctgtttgttgtactgtcactacctgtcatttcagattgactgtccttccgtggaatggttaaataacactggatagccctataacggattgtgctatagtctttacaaatcttcttgtaggagaaaatatgatgacttagagatatgtttatattacattgtcaagtgaaaagtgttgtataatacatgtgtgattgacttttctttctttgcttttccttttcttttctctttctctctctctgtgtctccctttcctttcttccctctttctccctcccttcctccctccctccctccttcccttccttcctctcttctctcctctcctctcctctcctctcctctcctctcctctcctctcctctcctcccctcccctcccctccccttctctcccctcccctcctctcctctcctcttgtcttcccattgatctttcaataaaaataaaagcctagaactctatgtagctaaacgttaacagtgtttatctctgggtattgggattattgatctttagaatgatcttcattttgtattttctaaagtttctataatgaatgcacattactttttaacaagaagtagtaaatgctattttcaacaaaaaatactgacttgtggcaagtactatgtcttacttatctttgtctttttagaacattgccttcctcatggaagatgtattagttagggtaggctaactgcagtaaccgatgatacccttaatatataacaagtaaaatgcgatagtttatttctacctagtgaatgaacagaacacaagatgttctggtcctgactttcccctgaataaaatctgcactaactaacaccgaggcatagccaaacctcacctccagaccaaattggctgaaataggcagggttccaatttgtgacggtcatttatttttaatggcctttctattccctgaaatgtagacaaatttgccctttgctgcctcattgcagtggaagagcctcatacctgtgtgcagagctgatgatgaaaggcatctatgtgtgtatgtgtgttgtagataaatagtgtattaactatgtgtaattccttatttcaaagtagcattttatgggtgagttttgcaataaatcttcaacgtttaatgctcactatgtcttgtttcatttgatatcactgaaaatgcagagggtcaggccacattcactctgtctctccctggcatgttaggttgccttctagagctctgtgtttcacaaatcattttgatgtagagactgtggagaaatattctcaggctttatcactgctgacttaattgagtttcatgatgcgcttttttttttttcatagtaggataaattaaaaatggctgataaagctgcctgtaaaagcaaaattgttaggttaaacctgcctggtgtattaaatgtattgataagtaatttggccaccatttttaatcacttttattaactctcaagtagttttatttccagtaacttgcaaaataactgtcattatggactcagtcatatttctctttaaaatactattgaaaagtccatgaaaatgattaaagtgccaatatcatccacctacttcctgttagcaagaattgttggtgattttgtgattagctgagtatatggttgtgctctctttgtgcaacccaggaggaaatagaaccagttcatcccaggtgaatagagataatgaatgggtttgaagccgtgtaacaggagtagtcttttgtgcatctgtatcatgtatgttattgttatgctgtctttaaaacattttattaaatattgagaagacaagatacttgtgaattatgtgtaaagtgtaaagaatcatgatacgtgtaatgtgcctttcggtgtcatctttgccatcggctgttcggctttgtaaggatcttgagttcaaggtcactaaagaacagcttaacacattgtcttgctcacaggtcaataagggatatatctcttcattaaaatggatgagaagtttgtcattactttactgcttcttggctagatgtgtggcttatgcctgtaatcacagtgctttgggaggttgaagcaggagaatcgcctgaggccaggagtctgagaccagcttgggaaacatagtgaggccctgtctgtgcagaaacaaaaaattaaatttgccaggcttggtggtgtgcaccttcagtcctagctactctggaagctgagtcaggaggatcccttgagcccaggaatttgaggttacagagagctatgattgcatcactgcactctagcctgggtaacagaataagacctgtctttaaaaataaaaaataaaaaagaattccctgtattttttccaatccatttgcatagcctccaaatcccattcctttcccctcagatttcggcattcccaccctatgggagaaattattatagttgccattcttaggatgtttcccagataaattacaggaatcataagattgctaaacaaatgtaggtggctaatagaaaaagagaagcagtaagcctacttttttcatttacttattcagcaaatgtttatcaggcatctattatttgataggctttgtactgatttctggcttgacaatgatgaagaaattagacatgcccctttctgagctaagaagataggcaaaagggttacacaaataattatataattacagttgtgctaagcctcatgagggaaaagtacaaggtcccagccaggtgaacatataacagaagaatctatcttagtctgaaagatacaagaaggtctttttgagaaagaagcatttctgttagggtagggaggaggggaaaggaggagaggaaagatttgcatttccaaccttggggcagagaaggtgaggaatagcagaaaggacagtcagcacaaaggaagcaaaaatggggtctgagaagtaaggaacaatcagacgattctagacttccaggattccagattttatcttaaaaacaggggaacccaatgaagggtttttaagaagaggagttatatgcttgtcatttcaaaaacatcacaactgctggttataaggagaatggactaaaagggaataagagtgcatgcagggagctgaggtggggccccagttgagactggatgtgtgcctggactagagtgggagctacagaagtgaagagaagtgaaagatttgagatgatttttggaagcttcttttagccttggctgtgatggggcaatgcctacaaagggcggtggggaggatggcccccagtgttctggcttgagcaaattgtatgcacagtaggtgatgcgatggcaaatactgcaggagaagaagcccttgtttagtgtattgtcgacatatccacatggaaataccaaggaagcatgtgcttgtttggagctggaggtcagaagagaattccaggttgtcttttgagtgtggtggttttggacaaggacatgacatttctagctccatgaagtagataagattgcttagggaaggtgggagagtgtaaggaaaagtgaagagaaaaggaagcataaggaacagccacctttaaaggtgaggcagagtgatgggaaagaagcaattagagcagtgaaaggaagacccaaaaaggattcaggagggaagagtggctgctgcatctgtgtccctcgaacatcctgatggaagaggaggaagacagagcccaaaccaggactttttgagtggtgactattgccacacattttaaatgtaagagtgcacattgcatttaggaccagtgaggacttaggacagagttctggccaatgccagaggtggagcccagaccaggagcagactgaagtactatttgccaacttccggttaagattgggttttagtaatatttttatttatctggacataagtagcacaaagctgttttaaatactctgaggctttctttggtggtgggggataagactgggaagaataactaatttgagagacccaatggatagtttgtataaagatatgattttcaaaaaatcatcaaaattgattaagtgttactaacgtgttgctgaaggtcactcgtttatgtgtttttctcctgagctaagaattctttcctatgtaccacctaagccctttcagtgacaaattattgttcaaatttttcttggcacactgacttgagaattaactaccattcatagctggtacccaggtcctatgagaatacaatgccttgtcacataaatacttgtgaagtgacatctatcaatctaatttagaaaaatatttgagtcaaaaggtccttgaaccatgtattaggttgacacaggagctccctttatctgaagctgtgactgagcattttaatgaatggcagtcaaggaattcaaagttattattctgatagtaattgcgtgcatttttcctgcccatctatatgcagccttctcattgtctaggaagctgctgatttgatgcattcatagctattatttgcatagggaatttgaaccaccatgggaagaatgattttgaatttcctgttttcatttatttactttgggtgcaataacagtgttttcatggaaggattttttatattgggtttttcctaattttaatacagtgtaaataagctaagtgttatatttctgaaaaccacacgttacaaatttttaaaaatgggggaaagatgaaaatgaaataaaaagatgggaagacaagttctgaaacctctgaccttacctgcgggctcctccctctagttgaccatggagaaccatagatgacttactgggccagatattctgatcttggacagaccaatggtttgtaaaatgggttgcatattatagtgtgcaaattcctggactagacttccagagatgatagttcatgtggcccagggtttgtcctgagaatctgcatttttgaaaagctctccaggtgatttttagtgtgcacttaagtctgggagctcttggaattgtttttttcaactaataaagttgaagacaccctgcacaagattagaagatggataagaaaagagaattagaatttactgagtttctattatggctgaacatgtttacatatcttacgtcatttattctttaacaccatcttgcaaggtatatcattttgttccaattttaacctgagattcaaaaaggtttacagaactttaaaggtcatgcagctgctgggaggcagaacctttatttgcctccaggtcatctgatctgctgtgtagaaccacgacaaggctgggaacaagaaggtctggatagaattctagtcacaccatcacttgggtgaggtccttttgccctctctgccaacgtgggtacctgttgctaaaggtagactttcctgtttatcatcaaagagtgcctataggtagatgagtggggaggactgcatacattttgagagtagtaaaatcagatccacttggacaaaactgtcttcaatattctacaatgaacatgccatgttattgtgaccagaattgacattgtatctctaccctacgctgacaagttgattgtctgagcgaggaaacagcactcatcatacatttatatttctccaggaaggaaaagagacatggtagagtctagtggggaaaaatctggcttcagattggacttagtacttgaattaagggtcaggcattggcttctacctctcactctgtactcatgaccttgggaactccatgtttctaaactttatttttagttttctctttgtaaaatgagaatgatgtgtctctctcagatcagtgagtaccagctgagatcatgtctgtcgagcacttaggcagtggtaagtgccttctttctttctttgttttgagacagagtcttgctctgttgcccaggctggagtgcagtggtgcaatcatggctcactacaaactctacctccctggatcaagcgattctcgtgcctcagcctcccgggtagctgggattatagacatgcaccgccatgcctggctaatttttgtattttttgtagagacagggtttcactgtgttggccaggctggtctcgaattcctaacctcaagtaatctgcctgccttggtctcccaaagtgctgagatgacaggtatgagccgccacacctggccacagtaagtaccttcttaatgttaatcagcagagggaagggagagtgactctctgcagcaggattcagtggagctagagatccagactagcaatagcagcagaatgaagatgaatcttgactacttgattgctgcatttttcattattttaggaacccagcggttctcctaaaatgcatgccaaaggtcctttgacagggtgctgctccagctgtggtttgtcggtctgcagtgttgtaccaccctggtgctcattaggactgcaaattcccaggtcaccttcagatgtaccactctccagatgtttctcatgctcactgcagtatgagaagcactactttaacaggcaacctccttccaggtgaatcatgtctggagaagttgcttggtcagagagatatttgtccaggctcagccatgctggctctgcagcgagggttccttcactagaacaccatgcatttgtggtggcagcataggtagaaggcactgagcggaaacaagaggagcgagatggagaaagaaaaaaaacaactttcccggaaaagttaaaatgatagcatgacctttctgaatggactttgggacatggcaccaagaatgagcaataatgaaataccaaggaaggagactccttaggagagcatctgggaaccatgcaaccatgcgacaagaggtgatgcagggaagctggtgagagggtgaactgaggctcccccaggggcgaggggggatacctcctttctgaacctcatgctgaacccgaccctcaggagcaacagattggggtaggagcttttggagaggggaattgaaatggccttgttggcagaatgactctgaagggaactttccagcacacccaggaaaaaaacaaaacaaactccccaatctgccagactccactttcttaactggagggcagggtggttgctcaaatattttgggctcagggctttggaaagatttcttgtcttgctgcatgctctgtggaaccaggctgagagcaggatttttgcatttagaatatcttagcagaactgggcaagatgaaaaccaatctttttgtagctaccaaaaagtggacatacttcagctttctgtcttctccctgctgacttgggtgtatttggtgtgcttgctctgtgctaggcccttcctgtctcttatctcactaaatcttgacaatatccccagagattggcatcattatactcattttacagatgaaactgtctcagaggggttacggaatttgcccaagacacacagctgagtggtgaagctggaattcagaaccaagttcggcttattagaaagtattcttatatactacatgtagaaatgaaacgcaacgtatgtgacagccattataatgtaaataataaaagtaacaggattttctccctgccctccgtaattcagtatacttgttgattatttgctgcttctggcaagctatgattgattgctgttctgtgggatatggagaagtttgaggaatttatgatacagctggggagaaaagacatattgatgcttgaccaggattaagccaccatatctcacaggtgtttagacaaaggagaaggcacctctgctaaggcacatcagggaaatctctagggaagatactgatttgacatagtactttctgggtatatagaattgtttcattttgtttgccgagtatgttaaaactgtttgcagggtgtgttaagatgatttgcagaagaatgttgcatatattattcgttttgatttggaaaaacaattaaaacaaggagagtcttattatttgccctatctttgggtaacttctgtactaacaaaactccggctcaccagccactagagttaaaattctcactaaagaaattgactaaatggaagagaatttatttctgatttcctttttaatgtaaacatatgtattgacacttttccttggaagaagtgtagtttctcttttagtagaaggaaatagaattatactctggcttaaattctattattataaacatacttctgtttttatcttgagataaggctttcctatatactgttgggagtctatagtgatatagtcattttctatattatttggccatcatttattcttttaaattcatttataattgtttttgcatgttttattgctaacatttaatagtgaccacccattaaagctattgcagtacctaagtatttataaatttttctgacatgttattgcttctggattataaactgggaaataattaagattcttgttcttgttgtaatgctgttatggtgatgatttagtatttccccaaacagtttatataatatggtctttttccacattggtatgtttctttatttgctggacagggtattttaatggttacatctaaatggaataaactcatagagctgttgatttgagaaaaccttctataatgccatattaatctatttagctcccagacctttcttagcagatcaaaggaatttcctggccactcccagaggtctgaccgccttttatctgttttaatgaaggtaattaaaattcctcagcttatgaaggtctggtcctggtcctaagtgaactagtccccagcagaatctgaaagaggactataagcaagccatttatttctaaatttttaaccttatatttctgtagatcctgattaaggtagttcctgcagtgtgagggcaaacttaggttgccagtattttagggaaatatgagttcttctttcataaactctgatgattattttgattcctgtatcattcatttgaaatgaacctgcaacactttgtgggtacataggaatgaagcaaatgcactctaaataattaaccagttgtgtcattgatttctactgataggtttatagcaaatgactttacacaaagttattaattaaatgctgtgttctgatgttgtctaaaaaatgtcatctggatgtccacagtttaaatcctcaacaaaatgttaaaagtcacagaaaaagtctttgacatagcatgacttaggatctccatattcatagttatttgttgagtaaatgtgctttgagcacttatcatgagccaaacactgggctaggtgttacagagacagtgctgaacaaagacctcgccaatatggtgcatattcccattttacaatctgtcagctcagccagtctcttaaaggccatcttttcctcaaacgagtttctgaaatgaaaatgaaaagagtcatttaaggatttaatctgagttctagtctataccctgaccacacaatgggcctcagggagaagaaggaacaagacaataccttactagagcaaaatgacttcccattatagaacatggtctggcactttcaagataaatgaagctgtaaagttaagttgtgcaattagtggacagagacaggtaatttgtgggcatggaggaggtttccaaatattcacagcaccaagtgatcaaaagctgtaagtagcatttgtgcacttttcttcatacattttacattaagaaaaaaaccatataggttgatattaagcagctaactgaaaatgaactgtccttaaaaagtaagtaaataaaaaacagcacttttcctgatgaatgaaggactgtgaaaaagctgttatgggcttagcctatgtagttcccagcattattttaaaaagatgaagaaaagaatgttgaagtctttgcattttcaatgcctaccaggtgcacctgccactcctgcatttctgggtttcacttttgtccattgctagctctcatttggtctgcaaatgtctgagtatctttcatgttccaggaactgtttgtgtgagatagatgcaatggtaaataagtcaaggtcgtcaccttttaggacctcatcctaccaacttaataggtgctagcagagactcgttgtgtgtctattataggataagtgagtgaaagtcctccttaggtaggtttcatcatctgcacttggatggaatgaatttatgaatgttcttagagacacttatagatctgagaaataaaaaacacataccaagaacttattgttgggatgaagaagagtaaataggggaattttttgggttcctcttctcctcatcctccttacaactcctcctgctgataagatatttagtcctatgattgacccagactgtcattttttggggcccttctctccatgcctgtggccaagccctgcctgggcttgtattaccagggatgactccacatgcttcttgcctgctattcacagaaggccctcttgtcttccgtgctcactgcgtggatggaacacccaggcaatgggacaccaggggtctgtatgtgctgcctgtgccagtgttctgagaagctccctgagactggtttggtgtaagggctgtcagtctgctccacaaacccagaataaattggattggaaaagtaggaaacctcatttagcttttgtgcctaaactttgtatacccaagcactgtttaccaaaaaagttctggatttggaagtagttaagtattcaaaacatattcaactatttatgaaaatgatgcttattattctatgtttatttctctcagcagggaagcccaaagagtaggggagatgaggagtaggttgtggaatcaacacccttcctcctgcctccaaaccacctgcactgcccaaggaggggccattcttttttgggagcccattatgtacttagctgtggatgagggtgtatgtgtgtcttatattcctgcttacattatggatagaagattgaaggtcacacttctgtgggtgtcctactgcacccaaaagggtattttacataaagcatgaataattgcaccttttcccccaaatgtcatatactttgatataacattttgtagagttaggagtcaggctttcatggggaagagggctgggttatgtccagttaatgggcaggcatgtagattatactttgcttttgataggtgagggactctttcaagtactattctacttcctctgtggttagtttttttctcccattcttctattctttttcatctttggggctgtacatcaggggaggagggtgctgcagtttgctattataatgggaaaaaatgagagagaaagcaaagagagtaggtaactgtactcagctttatttattttatccacacctcaagctcttattaggaaagggtgggttcttcttttctttttttttaggggggcggttttcttatagaataattactggtattctctggttgataagctaagagaaaagagagtcagggaaaagtactttactgtttttctatgttgtgttcattggttgtttttgtctgtctagtaccaaactttccaccaaccacataccctcttcacggttcccctccttccttctccaacagggaaaggcaggcaccagtggattcctctgtagtcaagacttaacataaccaggaattcttcctaaaggaagaagctatcaattagctaattatacttttcccatcccaaatttgttggacttctttgaagacaggatgatttaaatgagtggagaaggcttacctgggtggagggaagcagggagtaccaacgcatagagtgggaggaaggttggaaatatgagtgagagaaggtgttgatagtggaaggttgcagagaagttgtctgagaacttattcagagccagatggaggaattgttctactgattctcaagaagaattgagagttcttgcagcaattgttattatgtggttttgcaacttctctataatctcttataagagtagtttctcttagaagcctagtcagtatacctgaaactttaattccacttaccattataatgagaaaataaattgtcttattagattctgtgcaccaaggggcaagacctgaaaggaggatggaacggtgtgtagcggggatggcagttgatctgcaaaatcaggcatggaaattctgaactgttattggagagggaaaaggaacaagctacagttaactggtaaaactcagtcatattataggttaatcaaggccatagactgtgtgcttggtactatggaagataaagtgatatggaaagcatgatcagtgaccagtgggcttgtaatctaaatgtggagacacccagaccttagaaaataactatcccataggattatttttggcaaaatgtcaaatgaacaggtcatagataaatgatttaagaattcagaggaggtagagctcacttctacctggaagggtaagaataagcttttgttgacggggagaggctggaggtggaccttcaagggtgggtgggacagagatttgtcagcagacatgaatatggggtgctgggttgggcactttacacatcacagtgtggatacaacaccctggaaaaaccctatcactcccattttagagtaaggaagcataggctcagaaagtataaatatatgacccaaacttccttaaccattgacaggacaagttatagctgaatttcagacttaagccctctggctccaaacccatcctattccagtaccagtttgcctttatgaccttctatacacagaaatgctctgagaacaagaaagcaagtattttgcacccaggatggaaaccacatcattttggtaagggtacaggtcatttgggaaaaaatgagtgatgagtttaaacagtggtctaggtttggaaaaatagtctagaactattgaaggaatttcaggcagagaatgaggtcagccaaactatgttttagagagaagagctgcaaaaggaatgattttgtagaatatggcaaatgtttatttaacttgtagcattttaaactagattacttttagcttaggtctgcatctgaaaatcagtgatttacgtagtcaacctttatgaaagttttctttgattagtcaatctagaaaagcataggctttattttttttaatttttatttctcatgcttgtgttttgttgcattgcgtttatcctggatgccttaatgaaatggtgcgatatgacccagggctctcatctgtttaactttgctaatttgctccattttcaaatgagtttccttggctgcaggagcagcagcagagcatgaactctgctgaaaggaatttcagttacaccgctactgccacctctggggcccccggataattttcttatcgtctttttgccgtttgggaacaaagccacgttgttcacgactgaaatacagtttttaaatgtgcctcctaccgtgtttttatagaaagagagcctcttctcctggaaaataaaacaccattgattgaaccaacagcccttcgaaagggctttaattattgcattaattacaaacttcaggacaaaccagggcccagtagtagggagccattgagcagatttctgagcggctttaaagaaaatgttaaaagccttttagatctaagaggctgaaattgagagaaggaggtgggcatgtgggagacactaccttcttcaagttataagctttgcattaaaaaatatcctcttccctctctgatttgtgtttcctgggaaagctccaatgactcattgctccaaggcctcaacattttctaccctgacattgatgagagagaggaaagtggggaggtggtctaaatgtcatagagtagaacttctccaaaaaaataggtcactggggaaaaaagaaatactcttggaataatcctttaacatgatcatcttcaaaatgctcactttttattctgaagaaaaagaagaaagaaaaaaggcaagtaatttctttctctggcaaaacattcactgaggtgttttcattcaattactttgatggttggctgttgggaaaattatcaaaagtgaatatgggtttgggaactactagaagattctcaaagttgctttttatgatctctttcccagggaaaataaatcattaaatactgaggtggctagatgaaattgaatgctacatctcatggtttattcagaatgggctcttccatctgacatccttttgacaggttctaccacatgtggcatttctggcaggtatgagggtaggtttcacattctaaaatgaaactggcagtcacacgtttccctggtttaaaacattttagcacttattatgtgccaaatagtgctctaagctgtcaacatgttaactcatttaatccttacaacaattttgtgaggcaggaactattataactatttagcagataaggaaactgagccttagcaaggtcacagtggagagcaggctgtccggctccagtgtctacttaattctaaccgaatactctgggagacaaagacgttcgtctcaattcatatcaccttgaatattcattgccagttgatgattgttattcttaattccctgcaaagactcaaccagtcaaacaattaatcaaatactgatttaccaattttctgggcacaagattaggcattaggagatgagtaaagatcccattcctacattaggagttcccaatctaatacagaagatggataagcaaatagggtgccagaggttggagtttgtggctcagatttgggagggttcatttatcaattcattattttaacaaagtgtagtgctagtatatgccaagcactgtgagtgattcccccatcccctgctcctcagtggttgcagtctgatcaggggagatggataagcaagcagcatgttgcattttggtgtgataattgctgtaattatgggcaagtacatgcaggggtactacatttgtaaatgtaccaagggaggtaatggcctgttcaggaaactgcactgtgacttagcatggctggagggtccagtgaaagcacagagaaggtaagaggtgaggctgcagaaggccccagaaagggttgggagtcaaggacattgtctgccatttcagagactctggactccattaggacattgagaatgttacttggtacccagcagtaagagttccttttcatccaagctctcatgtcactttaattgaaaagtagaaaagcagaaagaaagagtatcctaaaattaagcaatgataagacactgcaaatttccgaagattggaaattgccacttttatgtagagcttatggctattttctcgctggagacagactgaaaaagtgaggtccatatctgtgtctatttctgggatattggctcagcaataaagatgttagaaaaaataaaatgatggggttaaaaatcaacacatgtcacattaatttctgattcttctattggaagaggatcacatttcaaggtcaaaagatggagcagtgagatttgtagagagaaaatttatgggtggatatttgaaaattttctataagtaagcattgagaacattacgaagctaccagattttgtaattttcaaaattacaaggaatgtagtggaattggataatggatggtggaacctcttattcttggatcattggtttagatagatcccagattggcaataatggaaatttatttcaattttatgtctgctcagtggctgaaatgaagtgggttaataggtgcagttttgctttttgtggaggaatgccctagtcacagaaacccctaaagcaaactggcctttatatccccccagatgtttttccaggatgggtagtaacagagagggatatctctttgtcttggatttcctttatattgtgtgtcaaaatggacagtgtacaaagagtactattcaaaagtgtgagactaatctcagtttattgtgaaattcaatggatcacaaagtactgtgtccccaaaccaaaacagatgattggaaaattgaagactagatatttggaattgcttgaatgctggaggatggtgtgggcaggggtggaggcctgggtttctggcatgtaaccctaaagtcctttttatctttagtcttgtattctacctgagtagtaggtattgtgaaaagtatgttttctatgagtttacagatacagttcctggcataatgtacagcatatagcaggaatcctgtaatcattgaaggagttaataaatgatatcatcagcatagaacagtttggctgctttatgtataactcaggctactacagattgggtatctcttatgggaaattcttaggaccagaagtgttttggattttggatttttgtggaatatttgcttatacataatgagatatagaggggacgtgatctgagtctaaacatgaagttcatttatgtttcatatacaacttatacgcatagcctgaaggtaattttacataatatttttctttttctgttttttgagacaaggtctcgctctgtcaccccaggctggagtgtagtggtgcggtcatggctcactgcagacttgaccttctgggcacaagcgatcctcccacctcagcctccctagtagatgggatgggtctacaggcctgcagcaccatgccaatgcccagctaatttttgtattctttttttttttgaaatggagtctttcccttttgcccaggctggagcacaatggagcaatcttggctcactgcaacctccacctcccaggttcaagcgattctcctgcctcagcctcccaagcagctgggattacaggcatgtgccaccatgcccggctaatttttgtatttttttgtagagatggggttttgccatgttgcccaggctggtctcgaactcctgggctcaagcaacccttccaccttggtctcccaaagttctgggattacagacatgagacactgcactcagccttatacaatatttttaataattttgtgcatgaaataaggtttgtgtacattgaaccatcagaaaaaaaaggattactgtctcagtctcccatgtggacagtctgtggttttttggcatcaccgtcactcctgactctgaatttatatgctactgataagctttgtgttcttacacttattcacgcataagtacttaacagtaaaaaatatgacatgcatatctggtgtgcacagaaaagatatatcacagatgaaggaggctgggagggccttttttcccttggggacattgaataaagcatgtgtgtgcacctgtgttttgattgcgactggtcacatgaggattgggtgtggaattttccacttgtggtgtcatgttggtgctcagaattttcagatggtggagtatctcaggtttcagattttcagatgagggatgctcaacccataaacccatatagagataaggagtcttggtacaacatgtgctttatagaaaggaaaattttaggtctcagttgtagacttagagaaattcaggactaagacatttctgtgcatttagttccttttcatttttattttcctaccaccttcccccagccagctttcatctttttctctcaaagctctgcaaatcattgaaaaaattttccatgttattttttaggacaaaaacttactaaaagtcatccatccagcactgagttcttactcacgggggtcaccactgctgtgttctagttcctttgcttttgttttgttcactggcccctcctctccaatccctgagctcctacactgcaggccttcctttttattttacgttttacactctcccaacctgactttatcctttcaatcaaagatcattaataaatcttgtattgccattacctcataaaataagtattccatttaatcacattatctatgtatctgaaatcaggaagataccgaaaggtggtaaacaggaaatgggaatattggcagaaatgtactactgtacagctgagaattgtcattctctttgtttttttttttgtcgaaaataaaccttctgacagagatgatcagagaaagggatcataagtggtttcatatgaatatcaagattggctcccattacattttggcactaggtgttaagtttttatctctctgatcctgataggtggtggtacttggtgggcagtgtcatgaaaaccaagagaaccagggccttatatttcttttattttaacttgggtttttattttttttctttgcaacttttatattatgttcaagggggtgcatatgcaggtttgttacttgggtaaattgcatgttgcaagggtttggtttacaaataatttcatcacccaggtaatcaacataataaccgataggtactttttcagttctcacccttctctcgccctcaatccacaaataggtcccagtgtctattgttcccatctttatatccaagtgtactgaatatttagctcccacttataagtgagaacatgtggtatttggttttctgttcctgtgttaattcacctaggattgtggcctccagctccatctgtgttgcttcaaaggccatgatctcattttttttaataactgtaaggaactcaaatcaacaaacaaaacataacttgagttttgagaggtgttttctaccagatacttccctttgaactttgtatgtgacttcctagagagaaagtgtgttgaggaagttcactattctattctgcagtgagagaagacgacaggctaccagggaaaaatagaagatcaaaacctttttatttatttatttttgtttgtttttaaagtatctgtttccatatgtatactattgtgcaaccaattagttggggatagcggatttttatgtagctggcaaacttatcaggcagaagagaattatcatgtatatttcagcagcaatttatgaacaggtttgtttctaaaggatgcacatgtattttgggtttcactcttagtttcactctgattaatttgcttaataaatcttccttcttaaagacagaggagaggcaaacacaagtcaagcttttgttttagccagtagatttataattaatgacttttgttgatttaagaagctttctgaacaattcttggaatgcagtggtggcatcatgaaaggagcaaagggaacattttcgtgggacataagtaagatttaggagagggaggagttcacagactatcattaattttacaggaggagaaaatcaatgtcagtaggaaaaaagatacgtacaaaagatgacttctggatttgaggaaccattctcaatagcagaaaatagagctgttctcaagacatatgttaggtctctcacaatctatcagcaataaaaaaagatagcaatatagagatgaaagaggaagagagaagaaggattaagatcagctgtcaaaatgttgcatacaaaatgtattgaatgtcactattataagaggtcttactgtaattaaatttcctgtctatttggatttgctcatcttaaagctttttcagttgtcagtgtgagaaatgtttcctatctaggtgttttttcctccctgttaagtatcagcacagtgtaattcaccatagttgggtagggtggtactgagaatgtttcctacctcagcaagcctaatgtatatgattgctttttgtgaagagttttttttccatttctaccattaacaaggtgttagacacttagcttggtagtagacaaaccattagatcaatattcccagaactagagagttctgatattggcaggcattatttattccattaaaaaatgtcatattcatttaacaaagatggaatgcagatagtttcaccgaagccatgagtgtgataaaggctatagacaaaagattcctgtgaagtgaccatctggaccagtttaggtgttaggatttctgaggttcttgaacaagagctgttcctgctagctcatgttttagaacccatgtacaggaaaattgaggttgtgtttaaaaaatatggcatgtagcacaggaaatatgtgttttcagagcaaatgataacttaatattggctgaataatttgtaagaatactgatttttttgtcatataacctatatattttcttaaggaagataggtttataaggaaaaattgcaataattaaactgagcataccaacaaggaaaaataatttaactattatgatgactcatttagttggcatcctcgagtaatgaggtgctctagattaattttcctgagagcagaaatatatccctttaaatgattaagcattttatcttcatcaatctttgaataatatatttccaagatatattttacattcctttgtgtcataaatatgctttacaatgtatagggctagaatcatagtttttttttttttttaagagtttaaagaaacactgggagatcttggaaaataatattaccacattggagtgcaacattcttgtctctgatatatgaggttttgattagatgatcatcaaaattccttctctttctaacattctctaaataaaaagtcgtttatgttttaaattgtagtatatataagaatcagctagggtctttgttaaacttgcagatactcagacatcatccctagaggttctgatttagtagatttggtgggagagaagagaatccgtatcataaataatcacctagagccattctgatgacctcatttagagaaacactgattctctttccactcttgtataacagacaccattactcttgctggccacgtggtccttgaaaagatcattgctgctttaccctcagtggcattgagttgtgaggggctgatgagactaataactatgctttgatagtctttgctttctgaacctttcctcagtattacctgtcactttgttaatggtagctactgaggaaaaccagatcatcaagcttattaaatcagatgccctgtacttgtacatttaataagtcattgagttctaatcttaggtctgggtagaggcaggggaaggactgtctattttctcctgtagtctaaagtgcatgcatttagcagtgatgattatattccctgtttggaggtcttttactcttttgtcatgttctggttgttttaagaaagtcaagttttctagaagcatgacgtcagaataagtggcacattactctataaatatcttaattttcatggtgagattcatagtcaggatggtctatgactttcaaatattaaaaatttaaatataccataaaattctcctttaaagtatactgttcaatgatttttagtaaaatctgtaaatttagagttgtatgaagccaacaccataatctaattttagaacatttccatcatcccccaaaagaaatcaggtaactgttcccactcctaaatccagtcaatcaataatttacttcttatctctatagatttaccttttctagacatttcatatgaatgagatcatacagtatatgcccttctgtgtctggtgtctttcagttagtgtaaagttattgaggttcattcatgttttagcatgaatcagattgccaaataatattctgttgtatgcagttactacattttatttatccatttaccagttaatggacatttggattgtttccactttttgactattatggctagtgtgttcaaatctttgtgcagacatacattttaattctacttgagtagttttacctaggagtagaacttctgggtcatatggtaaatctgtttcaaggtagcagtttcacatgttacagttctacccgcaacgtataagggtttcactttctctacatccttgccaatacttattattattattggatacaagtcccttattggatatatgattttcaaatactttcacctagtcagtgagttacctttttactttctgaatggtgtcctgtgaaacacagtatattttattttgatggatccccgtttatctttcatctatgcatctgggtactttttttttttttaaagaggaatctttaacccaatactcatgccttcttgaggcttactcaagatcttgtaagctttgtttagtatgaagtccctagtgatacctagcatatagcacctagtttaaacagattacagatgaatattcaaagtttttgacctgaatttactgtagtcaacagttaccctaaagccttaaagattaccaaagccatgatagactcagccaccatcatgcaatggctatgtccttcgtagcatcctttcttcacattcatctttgctttcagcatatgaaggggggaatgtaggtctttaatttaccttgtactgtggggtagcactatcctttccttactccattttcaggcccttggatgcaggacccttctctgaggtcccacagaggtggaggcccagcctgagcttttacaggttttagagtaagatgtcaggacagcagttcacactcagccacatcccattaaaagaaataaaaaagtggctgggcacagtggctcatgcctgtaatcccagcactttgggaggccgaggtggatggatcacttgaggtcaggagttcaagaccagcctggcccacatggtgaaaccccatctctattaaaaatacaaaattagctgggcgtggtggtggacacgtgtaatcccagctactcgggaggctgaggcaggagaatcacttgaacctggaggtggaggttgcagtgagctgagattgtgccattgcactccagcatgggtgacaaaagcaaaactccatctcaaaagaaaaaagttgctgctgtagagttttgtcataagaacatactggctgcagtgtccataggcaaagatgaagctttactgagggctgatatactcaatacttctgcccagtccacttgagtctgtctttgcctaaatactaaattgtttgaattctcctttagttttagattttccctactgaattgacatggagaaatgttatcaagtccaatttgcaagaatgctggatttccacttggagcttttgttttcttgggcctagaaggcatctcttgtttataaaaaaacactgggcatcattgtacatgagaaacttaaagacagtgcatatctggtagcagttgatatacagtgtattattcctaaatgtagtaataacaccttacaattggaaaaaaaatgagttatagatgaccaaatgcttccataaatatgatcacatttggtcctcccatctctgtgaagaattattattcctcttttacaggtgaagaaaatgacttgtcagaagtcatttatttccaaatataggacttctgataccaaattttgtgccttttctgtagtgccatgcttcctctccaaagcaatagttgaatttctgcaattttaagaaaatcatatatgtcgtgttatattagacccgtggctaatctataagcagtcatttatattttaaatgaaatccattaatgatatattcactttctagggcttatttccatctcaagcttccatttctgattgtaatgtgtaatgttgcatttcctgtgaaaggaattccaggctttggattgtaggtgggtaagattagtggtgggtcttagagagtcgggagatcctgagcatgggaacagccttttgcccgtaagtttatactgtgctcaaagatagtctgaatagttttaggctgcctggggtcccaaggagactttatgcctcccgatagtaaattttgggtccccaaagacccaacaatatttccatgcgatcatagcttgaccccaatttatggatgcttccttcctttcttctttaatccttgacaactttcttccccaagatttcctcgtgtcagggacccagaggccattcttactatgatctctttcttttccatttcattccctatggcttagaccatttaggtggggcagtggttctcacagtgtgaaccactcatcagcagcaacagcttgttaaaaatgcaaactcaggacccaccccatatctgcttaatcagaaaggcctgggaggttgaaccctccagtccgtgtttgatataccttccaggggttctggtgcatgcgcacatgtgagatccacttgtgcagtggttaagagcaaggattctggaatcagcagccaggtttcaaattttagctctgccatttggcagctaccacttcctgccatccatttacctatatgatctttggggaaattactttcctctctagactttaatttcctaatctgtaaacttgtggaataaaatatgaattacctacatgggaagttgtagaaatgaaataaggtaatgcatacaaagtgtctcacgtgatgtctggcactctgcaagcatccctgaatgggagctttcatggttgatatggactctgaccctagtcattgcctgcacagtgcttgatgaccttcccttgcttgtctctagcagcttggcatttaactactcaattctaaacctgaatgtttgccatgtgctccattttcagtagtatgaaaatgagactagttttcacactaaaatccctgtatgaaatatatttgaaattttgcttaggtcttgcttttgttttctgccacccagccagtttcctatctgggataggacatcgcttttgataataattcaatatttaaagcctttgtttaagaatgtgtcttaagacatgtttaaaagtctaaataaacattatatcctgtctcaatttatctaccacttaaaaaatttcaagtgttttttatctatctatgtctatctattgatatagaatctatgtagggatatagaatctatggattctaaatagattctatatagatatggataggtttgatatccctatctgtggcttttctcctataacatttttctaacttaattgtcagaatctgttctctagtagaaaatccaccgatgtcagaggatcacttgagtctgggaatttgaggctgcagtgagctgagatcatgccattgcactccagcctgagtgacagagagaccctgtctcaaaaagttcatcaacatacagtatacttccaacaaatccacagtaaaatttaatgtattggatcattttcagactcgcggcagccagtccttgggctatttctatgagtctttatgtaactttgactacaaattcgaagttgtcctcaaatccactagaactcctggttggataccattcaatcctggtgatttattttacttttatttgtcagttaggcctagtacatcccttgcatttatttttcctgaatttagcatatttagactgcttacttcagaagagaatttgttttcaaatattctctttggtaaaatatacctcagaagttggatttattccctttcctatcttttattcatctatgtactgcacttatttttataagttcatctgattcttcagctggctttctgccaatgataaattaaaaaaaaaaaactacacataaacgaaaccaacaaccagaaaacccttttaacttgttatttatttatttatttattagcaacctttaaactctttgaattatgtcatgaatttcctctgacttacaagctcacagggcagcattttctaatagtgttttgttttagcctgaaataaaaggttccatggtcaagttagcataggaaaggctacatacttattctatgcccctttatcccctagcctctgaaacagtttagtaattcataattcacagtagcatttgaaacactctgagatgtcctgcatagacaaaccagattaacttggtttgacctaatttcccccccaacataaacacttattaacaatctgtgaactagtgttccttagaccacctttgtgtccattgaatttagaagttttcttattctcatttggcatagcttaatgtttttagatgtgctttagttttttcctctttacctatttgtttctatttggtttcttcacttacgctttttccatatatatttttttgacaagtctgtgtgacccaatttaaacttttctgatgacatttactttgaattaaaaaagattttttgttcattacttatcttcctatattctatattgaaatgattattttaatatttaatgttatagcatattaatttattaaagtattaaatatttatattattaaatttattttaagttaaataatcaaataatattgatattaaatatttaaatatttatatttaaataatatttaattttaactttatattgatataaaattatttaaatattgataaggatattactttggtagtactggtggttataatgtttttaactgtctttcttattcactgaatatattcactgactatttcatggtaggtttttaagctttattgcttttattagggaataaatgactaaagttatatattaacatttacatttgtaagttaatcttcaccataggtaatttttgctttttaaaatttgttgcagtactctatatttccttgcgatacttactctctttgcacatgcttcttcttttgcatgaaggctcttgttccagatatccacatgtctgtttcctttcctccctcagttctcttttcacctgttgtcttctcaatgaggctcatttttgctgctacatttgtttttagatgtatttgtaaacatctagacaccctaccccaacactacctattccccttcttgacttcatttttattttttgtgttgatcaatatgtaagatactatgtatttcttgtattcattgtatttatttgttctttcttaatagaaagtaaacttcccaaaaacaaggattttcatctgttttgtcactgctttgtctctgctgtctagaacagtgggacatattttaggtgctcagtaaattttcaattggatgaataaatacaataatctcagaagatgtaaaaactgcattccataaaattcaaaatccattcatggtacaaaatcagtgaactatgattaaaaggtaaaaacattgagcaaacatgatatttattggtgaaacattgaaagtattcttttttaagattacaaacaagttaatacatctttaatcagcaagataacatttctatgcagcattattatataggaaattctagctaaaacaatacaataagaaaaagaagaattattagtattgaagaggaagaaacaatgctatccctagtcttagaggatattttgtctgcatagtaaccatcccaaaaaaatacagattaagtattagaatgaataaaagaggttatcaaatatgccacaaacaaaatcaatgtacaaaatcaattgcatttctgtactttgctacaaatatttggaaaaggtaacaaaataccatttatagtagtatacaaaatataaagtacctaggaaaaactcttagaaaaacaggaaaagacctgtgtggagaaaatgataaaacaaagatccttgagaaaacctaaatgagtggtaaaataaatcatagttctgagtagaaaaataccaatctacaaaagatatgattctcctaaaattgtttatttttattttttatttttttattattatactttaagttttagggtacatgtgcacaatgtgcaggttagttacatatgtatacatgtgccatgctggtgcgctgcacccactaactcgtcatctagcattaggtatatctcccaatgctatccctctcccctccccccaccccacaacagtccccagagtgtgatgttccccttcctgtgtccatgtgttctcattgttcaattcccacctatgagtgagattatgcagtgtttggttttctgttcttgcgatagtttactgagaatgatgacttccaatttcatccatgtccctacaaaggacatgaactcatcatttttatggctgcatagtattccatggtgtatatgtgccacattttcttaatccagtctatcattgttggacatttgggttggttccaagtctttgctattgtgaatagtgccacaacaaacatacgtgtgcatgtgtctttatagcagcatgatttatagtcctttgggtatatacccagtaatgggatggctgggtcaaatggtatttctagttctagatccctgaggaatcgccacactgacttccacaatggttgaactactttacagtcccaccaacagtgtaaaagtgttcctatttctccacatcctaaaattgttttagaaattttatggaataaaaatataaaaattcctgcacctttttactcaccatggaccatgcaagctcattcctgcccgcacacagaacagcgaacagggagttttgccctcccagatattaaaactgtgtactactataaaaatagcaattaacacagtatagtattgagtagaaaaagaaaataatagatgatttcagacagactagaggacccaggaagagacccacacatttatgtaaaattctttataaagacttgactcttaagacaggtaaatgcaataaatgctacatgacaattggttaactaagtggagaaaaaaaatggatactacctcacatcacacataaaaaaatcaattctggttgcaagacaaatctaggaaattgttagaaaaatatatataagaagatagctttatgacctcagataatgaagaattttaaaaacaagatacaaaaagcatgaaccatatgggaaaagatttagttttactacattactaccctatttatccttgttaaaatgttcagtagctccaaatacaatggaaaaaagactgggaccagtgtctcacaaaagagaaaacacaaatggctaaaactaatatgagaagatacacaacctcattagcaatcaaagaagcttacatttaaatgacaatgacatatcatgttccagccagtatattggagaagctaaaatgagtaatagcaagagctgcagaggtatgggagaaacagaacattgttagaaaggaagtaggttgttagaactaatttgcaaagtactttgactttatcttgacaagtttaagataccttaaatcccatcaattccattccaatgtatagactctggagagcttttatatttatatatgtttatatttattatatattatatataattatatgcattatatatattcacacacacacacaggagatgaccataatattcacagaatacttgcttggaaaattttagtagactacttttagagcaggtttaggatcacagcaatatagagcagaaaatagagttcccatatagccttcatccccacaaaagggcaaccttttcactatcgacatcccaaaacacaattgtgtatttgctgcaattaatgaacctatgctgctgcatcagtattacccaaagtccatagtttacattagggtctgctcttagtgctgtgcattctgtgagttttgacaaacctttaatgacatgtatctgtcattgtagattcctatagaagagtttcacttccctaaagagcctatgtgctctgcctattcatccctctcttcccactaaaacctggcaaccactaatcttttcaatgacttcatagttttgccttttccagaatgtcatatagtggcaatcatacagtaggtaaacttgtcatattggcttctttcgcttagtaatatgcaattaaggttcccaccagcactgaattcccatcagcaatgaatgagagtttctgttgctccacatcctcgccattatgtggtgttgtcaccgtttggattttcaccattccaatctgtagaatcattgttattaattggggggagagacaaccaacaaataaaggaaataactcagaggttcgttagcagaatgattttaaaaattgagggctgtgcatataataaagtgacataaaactatatacacacattgtactaaagtcgatttgctgttttgatattgtactgtaattaggtaagatgcaagcactggggaaactgggtggagggcacatgaagcttctccatactatttctccaactttccgtgtgcctataattttttttcaaaccaaaatgttaaaaaaaattcgagtgttgttttctcatagataaaatactgtccagctatggaagcaatgaaccacagataaaaaccacagggctacatctcacaaacgttatatggaataaaaaaatgcagtcgaataaaaacagatgcagtataatgctcaaaacatacaagctaaatgatatattactttgggatacaactgtgataaaactcaagaaaaacaagtgaatgataagaaacagaattggtgataatgcttatctcaggggaacccccacgcttttgtgagttttacatgcaggagactatcaggtcctcatagtgaatatcggagaataattcagggggattggaaaaggaacattttgaaatataccagagcattctgtgtattcttattaactaacccgccctcgggagaaacgatcttcctagagtctaacctgctgaggttttattagagcctaacatacctgggctaagagaaaggaaggaggtttcatacaaaatgaagcgttctcttaccacatgatccagaaatcacactccttagtatttctccaaatgagttgaaatgtccacacaaaacatgcacatggatgtttatagcagttttatttatgattgtcaaaacttggatgcaaccaagatgttcattagtaggtgcatagagaaaaaaattgtggtacacctagacaatggaatactattcagtgctatcagtgctaagaagaaatgagccatcacgtcatgaaaagacacaaaagaatcttaagtgcatatcattaagcgaaagaagccaatctgcaaaggttacctaccgtatgattgcgattatgtgatattctggaaaaggcaaaactatggagtcgttaaatagattagtggtttagtggggagggaagcgtgagtaggcagagcatgtaggatcttcagggcggtgaaactattttttatgattctgaaatgatggatgcatgtcattatacatttgtcaacacctataaaatgtacagccctgagagtgaatcctaatatgagctatggactttgggtgataataatgcttcagtgtaggttcatttattgcaacaaaggtaccactgtgctgggggatgaccatcgtgagggaagctgtgcatgtgggtggggcaggggctatatgggaactctcactactttctgttctatgttgctgtgaacctgaaactgctctaaagtataaagtttaaaaatttaaaaaactctgatctttagtttagcattttacaatctattttattgaaaggaacaaataaaagttaggattaagagaattaaacatttttcatagagcatataaatatagagcatgtaagagaagacttgattctcatttcagttctgatctgtctttaactttggcttagctggttttagctgatggtttttgaaggatggtccccagaccagcagcatcaataccaactggatatttgttagaaatgtaaattctcagacctcaccccagacctattgaatcagaaactctgggagagggactgctatggcttgaatgtttgtgttccctacaaaattcatgttgaagcttgatctccaatgtaacagtattaagaggtggggcatttaggaggcaatgattaggtagtgaggtctctgacctcatgaatgggactagcaccttatgaaaaggctggaaggaactacgttggcctctttggcccatcaatctcttctgccatgtgaaaacatagcatcaaggtgccatcttggaaacagcactcgtcagacattaattctgctgggaccttgatcttggacctcgcagcttccagaactgcgagaaatacatttctgttgttattattacaaagtgtcaggtattttgttatgcagaaggaacagactaatacagggactcagcagtttattttagcacaaggcttccaggtgattctgatgtgcatagacttttgagaaccactattactttcaaccttttcatctataaaattataaataacactagatcactttttttcaacgtgtgatgtatatattactgatcatgtgcaggacagttttaggtggcataaataagagcattttaagttttaccagctctgtatttattttaaagtttgttagaaaaatataaatagcataccaaatctacaagttcactggtgtttttgcctcatatatggctaagttaaaaaaaaaagaaaacaaaaagagaatcaatggaatcaatttgaacttgatataaatagaaatagccaaaatagtaaggtgataggagaatatcacaaggtgcatggagtaatttctcaaattttgaggccttagtaaccctgcactggattaatctcctacgtattttcattctaaaactatgagatttcatatgctcgtttttcttacagatttgcctccttaattttctttttaaaattcaagctcacatattaaaaatgtagtcgatgctgtttgagcttggaggggaaatggcctattagtgtgcttttgtactgggggatacttatctgagattcatatttaaccatggttaatggacatggggataattcacatgcaaatcatcaaagttaaatatattaagaagaaatctgtcctgaaaacaccatttaattttagaagcattttcttcttttcactacttgaagtatttatagtggaataggcagatgtttttataaaaaggaaatgaaacgacatttggggacagtaataaacatattttggttaattagggatttatactttgtaaaagttttcacattataaatagctaaaacatagctggcctttttaagtggcagtttaaacagctttattgagatataatttacattgtcatagagtccatctacataaagtgtacaatttagtggttttgtgtattcacagagctatgcaaccatgatcatgagcaattttaggacatgttcattatcccaaaaagaaaccccatgttcattatcagttactccccatcccccatgtagttccaaccctaggcaactacttacgtactttttatttctatggtttttctcattctggagattacatagaaatggaatcatatatgaagtggccttttgtgactggcttctttgacttagcatgttttcaagattcatccatgttgtagtgtgtgtgtgtcagtattttattcttgaataatattccatggtattgatatatcatgttggtctatccattcttcagttaatgaacatttgggttgcttttactttttgctatataaataatggtactatgaacattcatatacaagtttttgtgtgaacatatgtttttatttctcttaggtgtatacctaggagtggaattgctgggtaacaatacttaatacttgatggtaactatatttaataattcaagaaattggatataaagcactcttattcaaagtaaaattgcgattttatttaaaactaactacatttctgttttaataaggtatgaattttgtttgtcaaggattttacataaaatctgtctccaaaatggtgtttggcaaaaatcattattaaaatacatgtttttgaacacagcagcttacagactgctattctacatcacagtttatcatcatttatcaaaattgtcatgtcctctgtgacatgtttctttttctgaatattttattgtcacatgtgtcattaagcatttagaaaaaaaatggcctggaatcttcttcctgaactgatgaaattcatgatttttgtgtatagacatttacaaataaattatatgttgttaagaaactaatggtagttttttttcttttaaaattctcacttcaacatcaataaaaaatgtttctgaaatggaaacataccattttgatgtctaactgcatctgacacttttaagttttgctgtcctattattaatattttaaagttttaggaagggctactttttatataatgagattttatattccataaattattatttgactttgttttactttgtcacaatgcttcttcaaagcttttttgccaaattggctacctttagattcctttttaggaaaggtcttcaggatggtcttttttgttgtttttgtttttgtttttgttttttgagacggagtttctctctgtggcccaggctgaagtgtagtggtgcaatttctgctcactgcaacctccgcttcccaggtttgagtgcttcttgcgcctcagccttctgagtagctgggactacaggcgcccaccactacacctggctatttttttgtatttttagtagagatagggcttcaccatgttggccagactggtctctaactcctgacctcaaaggatctgccagcctcggcctcccaaagtgctgggattacaggtgtgagcctctgtgcccggcccaggatgctcccttttaatagctacttaggaaattaggttttggtaccttgttgttagaagagaatattcctgaaaaaaggaaacaactaaatgcatcgactatctggggtagtagaaagagaagcgacagcacagagaaaagatgccccttagggaggagaaagaaacaaatatcaattagacttgaacgaactaggtttctttattgatgaagaaagttaagccacactttaactttccttgccacactaaaagcaaacaaacaaaccccaaagaatagtcaagcagctgagacattcagtagccttgtaggcaaaacaagacatattcttattgttggagtatagttgtgtaaggcctgtagcccctttcttttgactaatttattccttttggaatgaaaatatttactcaatgcctgtacctgatctgcagactgatcagctgaaatcatccttgattttatttctgatagggagaacctgtcctgcacttaccatggtagagtagtgggtgtttataatgaagatgtaaaactttatagtttggatcatgtgggaggtagactctgatacagggcttagagtgtttattagggagtgctgttggaaacaacacaatggaagagaaaagaatcaggatcagacagatggaagagtcaaggtgtttctttggccaacaacatggaagctttagaactgaaatggttaatcagtttagtgccatgtttggccaaagtggccaggtctttgtaaaccacctccattagtaaatggatgcggctgtcacctcccacccaccagagcatgaccttaggtcaggcgttctctgcagctcagactgttccagcccctaaaggggcttacagctgggattgtcctctgacaacactccctacatctgggccaagaagttcttccttgaggattggtcttgatggtgtttctcctatgtctgctgcactacatcagtcattgtccccttaaccttcacaaaagcttttgaaaatatttatattttttgtttataaaagtggtacaattagacaccaatctgtattcaacagggcaatggttaaatccatgactttggagactatgtgtgctcttgtttgaatgtttctatctcccccagatttatatgttgaaacctgatctccaaagtgatggtattaagaggtaggacctttggaagatgattattagatcatgagggtaaggctctcatgattggattagtgcccttatataaaagggccaacggagcttgtttgtcccttccaggacatgcgaaacgcagtgagaaggaaccatctgtgaggaagtgggccctcactcaatctgctggtaccttgatcttggacctctcagtctccagagccatgagaattgaatttctgctgtttgtaagctacccgtcaacgatattgtcctagatccgcccaaatggacaaagacaatttagaattaacataatgaggaaatctgtgtgtactgatgagaaaatatgtccatcatgtcatagactaaaaaaaccagtttgccgactatacacatatatacactatgattatatttttatttacaaaagctatacaagtatgtaaaatacacaggtacgtgtagattcactaaagcttttaccttctgaagactgggttgggggtaaacaagaagagagaatgatagttttcaatttttgttttgtatgctcagtttatatgttcatttttctgttgctgatgtaacaaattatcacacatttggcttaaagcaacacaaattgtttatctcacagttctggaggtcaaaagtcaaaagtctgtcttactgggctaaaatcaaggtgtcaggagggctgtcttcccttctggaggttcaggggacaatctgttttcctgccttttccagattctagaggctgccttcattccttgacttgtgacttcttcctccatcttaaaagccagcagactcacatcttcaaatctctatctaactctctcttccgcctccatcttccacttcaagaatccttgtaatttcatggggcccacccagataatccaggataatttccttgttttaaggtcacatgattaacaatctaaattccatatgcacctttcttaccacttgccatgtaacataacacattcataggttctagggctttggatgtgaccatgtttggtggggtgttattctgagtactacactaggtaagtgaaactacagctttctcacaacctatgtgctagctgttcatgcttcctgttcagataataccaggtaaatgagagaagagaaacatccgtgggtaaacaattataatttagtacattattattctttaatttctatagtatttataataaagttcaataagaatttatctatgaggaagtggcttttctaaacaagtgtaaagcccccttgtttggaaaaatgtcagagagactgcatactttttcttcttgcccgcttttcccatgctggcctctgttgcagctcttctgaaatgtaatcattgctttatttctttatttatctctttcctaattttcttggaggttctttaagatgggggctatatactttaacttaccaacctattcaatgaatattcattaagtacctattatggctaactatttttctgaacatttgggatatataaattgataaaaaccaataaaaatttcacttctttaatggaggaaagacatcctatatagagggtgatgaatggaaataaactagaacaggtcaagaagaatcacaagtgccaggtttagggattgtttgtaactttaaataggttattagaataggccccattaggatggtgatatttgagtaaaggctttgatgtggtttgggtgtgtccccatccaaatctcatcttgaattgtagttcccataatccccacgtgtcgtgggagggaccctgtgggaggtaattgaatcatgggggttttacctccatgcttttctcttgataatgagtgagttcttgagatctgatagttttctaaggggcttttcctccttttactccacacttctccttcctgctgccatgtgaataatgatgtgtttgcttccccttccaccataattgtaagtttcctgaagcctccctagccatgctgaactgtgagtcatttataaatttcctctataaattacccagtcttgggtatttcttcatagcagcatgagaatggactaatacaggcttggaggagtttaaggagttagtcatggggtgtcagagtacgcttcattaggaagatgctatttgagtaaagactttgaggacttcaaggagttagtcatgtgggcaactacacaactgcattggaggcagagggaacatttactctaaagtccttaaggcaggaaaattccaagactgatcaagtaacagcaggagagcgtgtgcagacgccttgggccaagatgttgaatacatactgaagggagccaagggtgggaggtgatccgagagagtgatttttctggtgtggatcagggtggtagcaatgaacgcgatgtaaactcatcagattgtggatgcgctatacttggaagatagggcaagtaaggtttgtggacaggttggttgtgggatatgacagaaagaggttccaaggatgatttcaaggcttatagtttctctaattggaaggaggaagttgccatcaactgaaataaggaaggctatgatgagcaggtttggtagagaagatcaagagtttgtgttgggcctgttataaagttgagattctataagacttccaagggtagatggtgagaagacaatctccagatatatgaatctggagtttaggaaagaggtctggaatatgtgtaaatatgggagccatcagcacataatagatgctgagtgaacgaagagactgcctgagattatcaaatgaggcatagatggcttgagaatgagactgaggttggagtcctgggtcactctagcagagattagggtaagaagggaaaccaaccaaagagagtaagctggagccctctgcaccctttttgacagcagtaggtagtagatgtttatttagtggataaatgcccaaagaggaggtaaagtagcaaatgacaaaggggaattttatctgtctatgtagaataaattaaaaggtgaaaaacagaatcaactgtatttatctcatcagtgaatgggtaggaagcaagtgatggaaattaacataaaagtagatctgaggccgggcgcggtggctcacgcctgtaatcccagcactttgggaggctgaggcgggcggatctcgaggtcaggagttcgagaccacggtgaaaccccgtctctactaaaaatacaaaaaattagctgggcgcagtggcgggcaactgtagtcccagctactcgggaggctgaggcgggagaacggcatgaacccgggaggcggagcttgcagtgagccgagattgtgccactgcactccagcctgggtgacagagtgagactctgtctcaaaaaaaaaaaaaaaaaaaaaaaaaaagatctgttcctttttactctataaatatatttgtttataaaaataaccgttaattttaataagttaaagtgtttttttcttatgcaattacttctttttaatcttcatgatgcttaatgtgctggtgtggctaattctttgaaaaagtatgtaaaaaaatcccttctctacagagatgaatctagttcttcagattggttattcctatactttttatttgtttttgtttttgtttcagagacagggtcttgctctgttgccctggctggggtgtaatcacagctcactgcagtctcgacctcctgggctcaaggaatcctcctgcctcagtctcctgaatagctgggactacaggggcacactaccacactcagctaatttatttattttttgaagagatgaggtcttgctatgttgcccaggctggtctcgaacttctgggctcaagcaatccccctgcttaggcatcccaaattgttgggattacaggtgtgagccacccatgcttgaccatgtgaatatgaatatactggagaatagcaacactaagtagttgaaactcattttagaaattaccccatgaacatatctaaattcttcataatgagtcatagaagaatttctaaagtcaacttggtaaaatgtactgatgattttcattgaaaaagcatgattttgctttcatatatttaataatttgtagaactttcaactttcactgtggtcttaactggtattaaaggtgatttggaaattgtattgagcatgtatcttgctatagtataaaagaagtagacattttccttaagaactttatattctaggttaaacagttaaaacacttatataaatatacatataaacagtttagttgagaaaatataagatgatgtaattgcaggtctgtttgactcccacctatctcttttgagagaagaatttataaaagaatagactgaaaaagtggcaataactataaacttgcattttgacaggaagaagaatagaaaaggaagcagaatcagctgccttgatatggatacaagttctacaaataggacagccactatgcttgaatagtagtagttcacatacttcacgaagtaaattaaatgtgattatattgggcctgacctgttggtgagaagtggatgtctcagcgtggggaggtgtgtaagcttgctcaggaccaaaaagagccctaggtagtgaaatctttgtgaggggttggaacctgaataggaaatagcatttaacaatgctcatcttaaaaccgaaaacctcagtttttttatgagtatgttaagaatctctgaagatacaacctgggttggacgattacccaagatctgttacatatttaacatcagggaagttatgcaaagcttattattgtttcttgtgtttattttgggtgctgaccttcagaaaggccttagctaatctccaggtcaaagcctatagtgaccacccttgctgccgctgcatgccacacctccctctctgtgctatcttgctgcatttagggactttgttgtcatagttcctctcttactgcaaagggattccaaagctcttgaaaaataggaagtagctcatccttttctatgggctgaggggagcagtccttgatttacgataagaaaattctataatctttggacctttgatagaggtgacaaatacagagatctttcttggaatataatttgtccaaaactattttgagaaagcacacaaggcattaacatttacatttccaattaaagcatagggaaactgtttacaacaaggggacagaagttgatgctgttgtttattgtgttatatgctggttatagaccctcgttttacagttatttctctaaaatgcagtaaaaaaaaaaaagaatgcctagcaacatagcaacctctatgaaatgaggcatatgctgtttctaagactcacaatatgtttttctgaactgtttgctcataaacatgtttattgtaggtgctgcttgggcagggacggctttcctgtagaaatcctctcttgaatacactaggttctggttcctcttgtggaagaatgaagctctttttgactgccttggaaaatttgatactttcaggtatttatgacataatcaatggctgatatgtgtcttcaggatttatgactgtcctgtcataaattgccgtagtttcagagtgcatacaacatcactgtctttttattactgttattattggagacaggctgtcactgtgttgcccaggctggagggcagtggcgaggtcttggcttattgtaacctcctccttgccagctcaagccatcctcccaccttagactctcgagtaggtgggactataggagtgtgccaccatgccttgctaattttttaaaaaacatttttgtagaaatgaggttttaccatgttgcccaggctggtctcgaactcctgagctcaagggacccacccacctcagcctcctaaagtactgggattacaggtgtaaaccattgtgcccagcccactctgtcttttgaggtggtgggaaggtgagatgtagtgacacagatattctgtgtaccatagtgataccttatttatgaatcatcttgctctctctcttgaagtctctctatgctagaaacatcatctgatgtggtattcgacacgggttcaccttctggttttgtcactaaatgctttatgactttgatctcagcccttctctgtgtctagagaattgttaaattactaaattaaaatgaatttttgagagtcttttgatgtcacaaaatgtaatagctgctgagtgcccaagtatatatcaatttttctttagtgaagaagatgcagaagtggtaaaggagaggctgcttttggagagggcagagtgagaggagatggaagtttggaaatatgtcttataaggaaggccaatgaggaggcaatcattctgtaacatgtacttgtgatctagtaaagcttgtgttttgtatagaaggctatgtaggcttttatgactgggaacgtgtgaaaataatgacctagagccaatggggcatagggacatttgcggcatctaacccaggtctttttcattcccaggctagggggctacaattctcttctgaaagttacttggcatgatcatcttgctgttcttaaagcaaaatagcccaaattttgttgaagaaatgttttagagaaatgattgcctcatatttctaacaccactcttggttatttgtttactaaatagctttttattgggggaaaagtgtatggaaatttaagttggggaaattacttgggagaacttcttaatgtattagtctgttcttgcactgctataaagaattacttgaaactgagtaatttacgaagcaaagaggtttaattgactcacagttctgcaggctgtacaggaagcatggttggggagccctcaggaaacttacaagcatggcagaaggatgaagaggaagcaagcaccttcttcacattggcagagcaggaggaagagagtaaaaggagaagtgctacacacttttatttatttatttttttgaggcagagtctcactctgtcacccaggctggagtgcagtggtgcgattttggctcgctgcaccctctgcctctcaggttcaagtgattcttatgcctcagcctcccgagtaggtgggattagaggcatgcaccaccacgctaggctactgtttatatttttagtaaatacggggttttgccctgttggcgaggctgatctcaaactcctggccttaagtgatctgcctgcagtggcctcccaaagtgctgggattgcaagcgtgagccaccatgctcggcctacacacttttaaatcttttaaataaccagatctcatgagaactcactcactatcacaagaacaacaagggggaaatccacttccatgacccaatcacttcccaccagatccctgtcccaacattggggattacaattcaacatgagatttgggtagggacacagagccaaaccatattactgaggaacaacttaatgtagatagtttctgtgtatgtgtgagaataaagttttcttataaaccattctattttttaagttcaactattttatcttccttaaagataggggggttgaaagttgattttatagtttgagctcttgttatttttcaaccattagccaataaatataagtggcaattatttaagaagaataacataataatcaaatatgagaaatataagaagcttagaattgtggagttggaagggacaagtcacctcaatttatagtcagcatttatctaattgttctgccccccttaactgtaaaatggcaaaagtaatacttgatccataaatttcttttaaggattaaaagataatggattaaaagataatgtatacattcaaaaatattttttaagtgttttgtttgtttggtttgttttttcaagacaaagtcttactctgtcgcccaggctggagtgcagtggtgctatcttggctcactgcaacctccgcctcactggttcaagcattctcctccctcagcctcccaagtagctgggattacaggcatgtgccatcatgtccagctaatttttgcatttttaatagagacagggtttcaccatgttggccaggctggtctcgaactcctgacgtcaagtgatctgcctgccttggtctcccaaagtgctgggattacaggcgtgagccacagcacttggtctattgagtgtttagtatgtgccaaggcatatgctggttcagaggatatatctgtgtactagaaagaagatcctggctttactaactaggagggaaaaaaactttacccggtgatgacaaaggtgataagtacttccacagtgctcactgggacaaagtgtcagaccttacacagtacctgatactaggggagaaagagggatggacctgatgtgtcttgggtgtaaagtatacccattatataatcctaacagcaattctgtaaacctggtcttattttccttccttttacagatgagcaaacttgtgttcttgtaggtctgtgtcaagtaatgtttgttaaataagttaatgtgtaaatggaaacctgagcagttgtgcaacatgcccaaattcttcagcaagttagtgacagctgggaccagagctgtttctgacttcagcccaggggtcctttcattattctacactgcctctcagagtgtgcataggtgtgtgtgtgtatgcatgggagataggaaagttgcagtcttatatatgctacacttatcaatataaaaattatttcacaaaacacaaataatagtgaagtcagggctcctagtttaatccattttaattcctatcactagttacaggtatatttaattatccagatacgttgactttgtgctgtggatttagtgtactaaataacaggatccaaatctgtgaagttttctttttctggaaaactactggctctgaagcaatttaagccagaattcaaggccattcatccaaaatttaaggtgttctgaaatagaaggtgtatatatcactttacttaatgtgtgggttgtgtgggagacttttctttgcaaattgaatcattggagaccaatgatcctataactgcatttgaaatccttcagctggcaaacctttggtagttttaatttctttctcaaagaaaacatctgttataggtgtctgtagtctagttgtgtgtgggctaccatttcaattagtaaagctataatgacagtcttgggattttgtagaaaccctagtaatagatagaagtgaacatttctaatcctttattatgatcccgttatcaatttcaagtcagtttcttccctatgccatctatccaccaactcccagctgtcttgaaagaacatatataatatttttctaactttagggaatttcttttaagtttgagggcctctttctttttgctaggaagggaagccgggtcaggaaagcagaggagttagttttggagggccctccttttgtgcatcatttagttgcagacctaagcaatgtctttaatcccaaggaaatgatacaacactcctggagtcttccacggttttcagaaggtgagtattcactaacagtacctaactctgtcccttctgtaatttatgtggactctaaacattgctgtaaagtactgctggagaaatacaagacttgtacatttttcttttcttttcttctttccttccttccttccttctctttctctctttctttcttttttttttttgatggagtttcactctttgttgcccaggctggagtacagtggcacttaaaagtcaacctgaatcgcatttttctccagtctgcaatagtttgcccaaataattacagttttaagtcttttaaatggttactagtccttccagcacagaaaggtgatgcagccccaaataatgtgtatgtcggtactgtcactacagtgctttgggtcgaccaatctcatcctgacttctgatctggagtctactgtcatagaaaggtataatatgcttataatttttctcccccaatatttctttgcttctctgtggcagtatttctcccccaaaacacttagagatgtttgattttatccttgcagctgttataaggcagacaagctcgagctgacacacacagtttctctcatgacaaggaccaattgtgatttatgaccatttacaggatgctagtgatgtggggaagggtgtgtttttagctagcaaggctatgtcctttcacttggaaataaacaacatgttaaaaatatgtagcagggttaaaaagaggaagcttcactgtaattttcgtttagtgaagagcccttaggctaactttctataatgttcagctaatgtgtttatatcttcaaatcatcttaacaaatatttattgactgcctgcttcttgcaaggtgttatgctggctgaaatgaaagttttcatgaaaattctaatgtatagaattaggaagttagaaagcggggttattagcatgggtctttgtctgctttagttgaatagaacctgttatgaagcaatacattttcctccaaaaatttggcttctttagcaagcagcatatcaactaaagatgaaagaaagaagtggaaacatttattcacttgtaatgttaatataaatctttgttttcatcagaaattcctgaaaagctagattataatatgttacagtacaaccttgggtttggcttttagcaccaaggttaaacaaagatttatgaacacaaaagatgctgtgaaagctcagattcctgctaaaccttgaatgtcctatagtcctctaaatggtcctaaatgtggaaaaatcagtcttctcattggttaggacccactgacttccgtcattgtaattactgtgatataacctgtagggtatgagtgattaaataatttaatatcactgggagagttacttattatgtgttttatttgtatatttgcaagcagttcttcatttctcatgacagttcttgcattcatcatttactaaaatggggttctgagttaataacatttttttcctcattataaaaattctcagaacaagtcaagatctaattagacatcttcaatttattaaatcagacctctttacagagcccttttagaagcccaggtaacacttgttgttttaaatcactggcccaacatagtcacatgaatataccttgatgcaaagaagacggtgaagatgtaattttttagcctttgcatattaaaaaaaatcagaattctgatagtaagaaaaacatattgtttagttgcccaagttgtgtctttttctccacctctgatttcttcccaatactttgatgaagtactctgatgaagtactcccaatactctggcgattttctttttcttacccactataaagtgtggtgtttgcacttcatgcctgagtctttctttctgagaagaggctcctgcaagtctttggcagctttcaactacattaattttacaggtccatccttgaagcaaaactttaaaaaggtattttatgcttttttccttcctttttttaaaaaaaaaatttttcaccttttaattgtcagttctaattatctgtgcaaactgattcaggcagaaacatacaattctgagagaaaaagggaccctgggactgacaacctaggtttactgagtgggagaggcagaggtgcttcccaaataaaaactgtggctgttaccagaagaagggaacagggatgctggaaaaagaaaggacagacatccagttctggaaggtttatttggcttttattcataaaaatacgaaaacctttccttggttttctgctcttaatcttcctttaaatacatcaactagacatagtcgatataggtggttcttgtaagataaaacctccttggccccatgcaggtactctcctgatatttatacacagaattgcccatgtctcttaaaaaagagaacatctgatttgcctttaagaaaaatgtgcaggatggggtgggaatgagggtgggtgagggctttacatttcatgcagttgcagactttttggaggcagcttttactctctgggtcatattttaattcctgatcctgaagtggaggggaatcctgatgttagtgtctgggtggtattcttgatagacttttagttgaataagtaaggaaggatgcttacatgaacaaaccttattcagtgtcccagtttctgagcagcccaaggcaccaaagcctaacctaggatgaggatggtttgtgtggagctggtgaaactacagctcccgatctcatccaagattgttgttttccatttgctgctgaacagctgtttgtttggctttccagcggcatgaatatgcccacataatcacaaactcctagatattgaggcatcttaatgagaacatagcctgattttggaaggaatggaatgaaggaggccaagtgaattgcatcagggtgcctggtagaaaaactggcattagaacctcgattctatgctcactgtccgtgctctgctccagtacatgaaatttgtcagagaaaatgagatgaagcaccatggtttcctatgccctccctgtttgttcctggtacttaaccaacctaaaatctactcatggatctgtcaggttttagatttagtaacaggctcattgactatggaaataattgggtgggggctgaggtctttatggtagattcaagtaactagagcaagagtagatgggttattgtggtagaatgagggacatttgctagtttaaatcacatttctgcagtttgtggttggacttggagcttctttttctctgtagcttagtagcagatgcgcttttcgctgctggagcaaaactacctacagtagtgtgaatcagcaagtagggagtattattagtcatgtgaattcagatacttcctattgccaaaggcttgatatattcatatcttacattttatcttctctgtgacgattcattacatgtagtgagagcatatacttagtcttctgtgtggctcaactgggggcacatttggtctagtccaagtaattatatgtaacgtaaaattacatacagcacagtcatcaaagaagctgtccttccttcccctatcactaagatctagggtgactctggagtgccactgtgtgaacatttctcactcttgtgagcatgtttctaaatcccaaatcaatctgacaaaggattttctgtgaatttcttgttaatttcttgacataaaagctcttatgaacatacatattccgaacttaattctttgtttgagtcaaaatcatttttattcaagagggaacaattatattaatctagatttgcctggtaaatccataacatacagacctgaagttcaagcagaacccgaggtaatgtgagccctgggtaaggtatagtaaggatggagaggtaggtaaagaaaggcgagaatgattcatttattgagaaagatgagcaaggtggtcaaatagatttgcttctcaacaaagcgtgtagtttaagcacttagttttggtttcttttgaagctgccttccctttttcccatctctctattccaacataacagaaaaagaaggaaaaaaaatcaatacaaaacaaccatttacttatttcccagagtaatgcttctcaaactttagcaatgtgcatgcaaatcacctggcaatcttgtaaagtgcagattctgattcagtagtggtcaggcagtgattctcaaagagtgttccttggagcagccttgttggaacaactgtgagcttattagaactgtaaatttatgagccccacctaacctattgagttacaattttattagatgggcccaaaaagtgttttaggaagcttaccaggtgattcttattcacctgaaagtttgagaatcactgacatagaggagattctctggagtttttctcaggactctggtattttctactgtcactgggcttacagtatacagttgatctttagcagtggaaacagttggacagagatctttatttaggctcctgaatggctgtcggcatcttgaaagttgactggcttcattaaagtctctatttcttggtcctttgacatctattatgataaccctgatactttctaaagcagacatgccacttcatggaatcacgcacctcatggaattccatgcacttcatggattcatgcacgttagcacagctagacacctttatgtggcaattgggtaatacttactttaaaagatagaataaaggaaaaactacctaaaatttcccataacatttttttttttttgcagacttttcaggggtatggatactatatgggctttatatcttcatatcagcttagtcctagttaattgttattttcaatcatattaatggccattggtcattgctagccagtatctatgactggctggttctaatggctacaagcatgcttagcagtgccctcatgaatgttgctattattgttgaaggaggaaaacattttaataattggaattggattttctcagtattcagtattgcaaaaggtggatgtaacttcttatgatgtctcaacagctattactttattttttaatttatttttaaaaatcttattgtcacaccccatgattctgcaacagctataattttaatttctgaaagttttgatgatttcctccaaggctatagctggagaaatgtacattgtctattattagtaacatttctcaaattgtttacaaggcctgcagtatagatgggctgagactgtgtttatgctttttcattgagaaattttggtcttgcagaaggaatccatttgttctgtgaatctctataaagcaaagagaagagttcaaaatttataagggagcccaacaagtgttccaaaaaaggctatttaggcacaacatttaggtgcttatctagtatgttgtttctatcaatacatagcttaaatataaatagatctaagaaccttagttaagacgaaagggtatagcataccatgctataaaatctgtcatacagaatacacataaagtgtctgctgtaattttgtaatctttccaaaagcaatatactgtgtctacagccctcatttacaacttatagaaatttactcattttatgcagaaaattggaaaggagcagatgtttattcctaagctagaattttgaaggccaacaattaaaataaacatgtctctgccaaaacttgaactaaattgaaaaatttagcatataaattaaagctcacttaaaactaaatttatcaaggaaatacatttgttttgcattgctggtttcaattattctgaaaggacttttatttttatggaacactgaagatttttaaaagtttcaaacaatttattggacaattgcaccatttaaaatgagttacaaatgtcttgcttaaatgtatgagctattagcacatagttgatgaccttatagagagacattaaagcaaccatatcctcaagtttatgtctatattcccaggggagtacaagaaactggtctgtagacctgaaatagataaagctgtgggcagcattctcttctattcatttgttcctttggtcaggaatctgaattttgagacatattcaataaattatgcatactcaaatatttgtgctcttagcttattgccacagaggaaaagagattatttcctactttttagtatctctctgcttttgtctgatttgtacaatgttgcctaattaatttttcttaaacactttgccctccacacattttgcctaaaaccttcattggctcttgtaagatgtgctagcattctagggtctcagtttactgttgctaccctacttaaatgaatctccaatgcttcctaattgttacttcttggcttcaaccaatccaatgagtttcctttctctgacacatatcagatttatgcaaagtagtttcttggcttaagttgccctatatttctacaaaggtctagtcagatggtcagatgtgactatctctacatatgggtctgaaatctagtttaggaattctatgctgtgaatgttttagcttaaaactctaaaatttaactagttttttgaattctctctattatattacatgcttctggaataaatataaacacaatgaaatcctttcttgaaaatttaggaagatgttatacacaatataaataagttgtaagatagtgatttctactagacagttaaggtattaaggactatttgtccttgtattaaatggacccaggctatgcctttctagtgtttttgtatactctgattttttagtggctttccattaaatcctgaaagctcactactaagactcatgacattttttggggggttagaaaaattactatgattcagggctgggcgcggtggctcatgcctgtaatcccagcactttgggaggctgaggcaggcggatcatgaggtcaggagatcgagaccatcctggctaacacggtgaaaacccgtctctactaaaaatacaaaaaattagccaggcgtggtggcgggcgcctgtagtcccagctactcgggaggctgaggcaggagaatggcgtgaacctgggaggtggagcttgcagtgagccgagatagtgccactgcactccagcctgggcgacagagtgagactccgtctaaaacgacttgcagcacatgaacttacttactatgattctctctctcaaataaaattctggtgacttttctttaactcaccaaaagtagatacatacatatttataattcattgtttgaagaaaagccttaagatattttgaaataaaattctacacacattacacagaacttgtagctacatgaggagagcaaggtttttttgttttgttttgttttgtttttgagacggagtctctgtctgttgccaggctggagtgcagtggcgcgatctcagctgactgcaacctctgccccgccgggttcaagcgattctcctgcctcagccttccgagtagctggaagtacaggcacacgccaccacacccagctagttttttattttaatttgtatttttagtagagttggggtttcatcataatggccaggatggtctcaatctcttgaccttgtgatctgcctgcctcagcctcccaaagtgctgggattacaggcgtgagccaccgcgccccagcctgtttttgtttttattttgtaaaacggccttctccacgctgaaactctctctcttttgctctttcatctgtcatctcctccccactcccacaccccacactcctttacccaatcttgccactgcaggacaagagataggatgaaagttggaaaataataatttatggagaaagcctgtgttccttgctttatgaaagtaaattgtagataattaatgttgtgacaagatgattctattttgatgaataaaatcattgaaaagctatcaagccccactgtttctctgctgagagaactttttttcctctctgttctgcattcctattcttggctttcttcccaattagtctctgctaaagagtgataattggggagataggattttcacctaccttgtgaacagtaaaaatacccatttttccaccactgaagctatgtgtattaatattctatgctttcagaaagaaaatcccacactactgtgattcctgcttaaaaaaggaggtaatctaatgcccaagtaaaaacaattttatggtacttttatgagcttctgggaacaatggccatgtgatgttcagttgcgtgtttcatgtctgatgactgagttcacgtacgtcttagaggctaaatttggtttaaaatatcttacatcttctcaaattccttataacaagagcagtaaattaaaattaaatttcgaccttaaatggattgcatgttttccatttgtaatatattcgtatggttcaaaaatctgaaagagtaaatgagtacatagtaagagatttccttcctacatccccatcttcccagctccttttactccccctcccttctgcatgaaaactactgttactagttttttatgtgtccttccagagttttttctgcatatacaaacctaaaataaacatagattcttattctcctactttttacaaaaaatgtagcacattttataaatattttgcctcttgatttttttcttgcttaacataatatagagttatttccatatatacatacatagggacatttcttaatttttttatagctgcatatcatttccttgcactgaagtaccataatatatgtatatttcacaattacctgattcatgtatatttgactagtttcaaatcttttgatattataaacaatactgcaaagaatattatatatgcataattttatacagtaggataatttcccagtattggaattgctaggttagagtacaagtttatgaatgttgatcagcattgtcaaattgcccttgtatagggattgtgcttagttcggctcttaccaggcttatatgagattgttcctttttcctcagccttaccaatagagcatgttgtcagcctttggcattttgccaatgtgataaatacaaaataatacattagcaaatttttaacctgtgcttttcttattatgagtgaagtaacatattttcatatatttgagtgatgttcctctatacatgatttgtatcttttatttttttcaacattcaaatattttattgttgatctttttattatttatttctataggcttcatctaaattgcaccttttcctgtgatataaagtaaaaaatgtttcagaattatatcatttgtattttgactctgagtatcatctttttttctatttttgtttttttgtttgttattttctgaagaattggttgaatttttctagttcatttttcttcgtggcttctggatttttagtcataattagaaaaggctttccccttccaagattataaaggaaatctcctgggattttttgtacttttgtattatctttaatatcacataaatctctgattcatctggaattggcttgtagtaagaagtttattttttctttatatgacttaattattgaattgactatctttttcccactgatgtaagatattacccttattatacactaaattcttctctatgttgagcaatagttttgaattttctgttcaatctctttggtctgtttatttatgtgccagtattcagggactatatgttttaacatctagaatttctaaactacctttaataactgaaattgctaagctgttttcctatttaaaagtttttctgaatattcttttcttcttttttctttataaacttccagattaacttgttttattcaaacagctggtgttttaaaaatagaattttattacattttcaaattaaattgctgtctttatgatctcgaaatttattctcaaaattatgatattactttttcagttgtgtaattccctttgtttcctctaatggtgctttaaatcatcatataaatcttgcacatcaactttatcagctttatctcttggtattctatctttttcatcactgttgttagtgatttctatatgttgattttgaattctattttactcatcttttattgcttgtagttgtttttcagttaattatcttttatcttccaggtgtataatcatagcttctgtagtaaataattcctttgttttcctctttccaaatttgtatagatttaatttggttgtaactcgtctaatcgctttggattgtacctagagatcagctttaaattttatcagtgatcatctttttcttgtttctgacttctgggattctaaaattttgtcataaagcatgataatggtttttggtctcggttggctgtattttattacgttaatgaagtatccatctgtacagtcctagagttgtagctggacctgtgaacaccaccttaagacacgcatttctcagccccgcttgtatttaagccttacttgtatcacctagtgattcatgtgtgcccatgttcttgccattgtaacgtaagtaaaagtgatacttgccatttcttccacatcctttcttttcccttcttgctggcaggaaaccagaagtgatggcaacccagcctcaactatgtaaaggacaacaaggccttcagggatggctgaccatgagatggagggaacctgggtcccagaatcacttcgtggaacagactactcccctgaacaacaacttccgattattacttgagaaagaaaaataaacataattgtttttttttttttttttgagacggagtctcgctctggcgcccaggctggagtgcagtggcgggatctcggctcactgcaagctccgcctcccgggttcacgccattctcctgcctcagcctcccaagtagctgggactacaggcgcccgccaccatgcccggctaattttttgtatttttagtagagactgggtttcaccgttttagccgggatggtctggaactcctgacctcagctaatccgcccgcctcagcatcccaaagtgctgggattacaggagtgagccaccgcgcccggccaacataattgtttttaaagccattttattgttgagttttttgttacacaaagccctttattaccatgactccacatttatagttgacccttgaacaatggggttagagggttaggggcaccaaaccccagtgctgttgaaaatctgcatataatttttgactcaccaaaaacttaagtactaatagtctacttttgactggaagccatactgataacctaaatagccaatcaacacacatatttcatgtattcatgacacacgtttttcttaaatttttctatatttctagtctgcacagcaaatctccaagcaatttttatgtatatttattttttaaaatctgcataaaagtggatttttggagttcagacccatgttgttcaaggttcaactgtagtccttttttttttaggtgattttttatttaatcaaatgatttatttttttttaatcaagtgatttttttttttggtcaaaaacctttttcatctatggaaattatcttgtgctgtatctctagatatattcatataaattatattaatggttttacaatatttgaccattcttgctttccctggaataagtcacatttcatataacgaattatttgttcaagtgcttctgggaatgtttcaccgatattcatacctaagattcgtcagctgtttttgtttcctgcagtctttataaagttttgatattagtgttactcttttttgtagaggaaagaataattttttaaaatttttccttgttctggggctattttaaaatgctggaattcactgttctttaaaaatgtggtagaattttcctagaaaacttccaaggccagaggtttcagagtattaataattggcacatttctctaattcatttgttgaaatcagattatttagagtttctatatcctttggggtcagttttggtgaattatacattactagaaaattacatatctcatccagattaaatttattttggcatagagctgaataaaatagtctcttttggcttttttatttttctttgtttttgtggctttttaaattcttattttcatgtttgtagtttgttcatatttccttgaatagtttagctgtgcttcatacattaaatatttttcttaaaaaataatttttaaaatgtatttattctattttttccctaactccataaatattaactaccctcttctccttttccattgattttttgttcttttctataaatttcattcagaaactcaatttccttattttctttattcttttaaattttttaataaaaattaaatgctctgagttttcctttgagcagtgctttagctatagctcatgaattcaggtatgatgtttccattaatattatatattcagatatatcagattgcataactctttgaagagggaattgttttggagggggttttaaaattaccatgagaaaatttttatttttctccagttttatcaatttctatatttaatgtatcatattaagagtatgttttcgctgttatttctagaatttgcctatttctgaaattttctttatagcctcatatgttatcaattttaataaatattccataaatccataaatatggattgttgaaaagaagataggtctttttatttctaatataaagtatttttggtatatcaaacatccataacacattaatgatgctactctattctcatagcttgagagaagagaattactctcttctcactagtgtgtttctgtctcttatttcctgtaatttcaggtttgtgaacattttgctattcataacaattttttgtgaattacactctcttgagttatacaatgttgttttttgcatcattttgggcctaaattcttgcttgtctaatatgaaaaataagaccatctacttggattcttttctgttttgccagtatatctttttccacattttaattttaattattgtgaatcagtttgttctagctattcttttaaacagtattgagcttggttttactttctcattcaatctaaatatctttgattttaacaagtaaatttaattgattgatactgatatagcaggtatgtttgttctgagtgctgccatatgttaaattttttgctttcatgtttgctttatgttctttaacagtctttcattatgttgtctgtgtacttccctttgttttaagtatacttctgatatgtgtgaaggtgacatatttattctattggctatctttataatttagttgttaaccttttgtaaactatgtttgtacttctatcagtttttttgatctgctttaatgatattacttgatttccaggaattttagtaaaataatcaacaaacattttcaacttcctaatttcttttcccctccttcgcatttttaaaaattttaccagttctgcttggcagagcacataatattaacattcttttttggtcatcccaaccctcaaatcttttctattatttccccagtcatatttatttggctgaagaccacctactactgtcgtcaagaaagattaaatcatttttgtaagtaaaagctgtttgttgcctttattcctaaaggacaacttgactcaaactttctttttctgaggatcttgtagatggtgctgttaatacatgttttatggtgttaaatgcaactgtagagaaatctgattttcatgcttataagtaatttactgtttttgctggactaccttacatattctttctttaccatttgaagttcaataactgtctgggttgtctacactgggttagtttttccttgcctccagtgtacctttcaatatgtatagtattattttatttcaaagacttttggggagcttatatctttaagttgtctttatgtctctctgtttttcctttttaagtactctgtcttcttctgttaaggctgctatcacaaattatcataatctaagtggcttatgaacaacagaaatttatttcttacagttctggaggctgagaagtctaagatcaaggtactggcagatctgtgtctggtgagggctgcttcctggttcatagattctgtcttttcactgtatcctcacgtaatggaaggagcaaagaaaccttcgggttctcttttatgagggcggtagtcccatgcttaaaggctctgcccacatgacctaatcacctcccaaaggtcccatctcctaataccatcaccttggaagttagggtttaacataggaattttagagggacataaatagcacactccaaatacgtttgttgtatctactttgcctgtcttctgtatccgtcatctagtctctcattcttttcaagtctttattttcattttattttgttctcctttttttaattagcctttatgttccttattctattttctgtagcttttttttatcatttctgtgatttcacgctattatttcttgagctctgacaggttatatttgagcatttcctcttgacttcctgtttcttcttcatgatcttttttttttttttttttttttttttttgtgatggagtctcactctgacacccaggctggagtacagtggtgcattctcagcagctcactgcaacctctgcctcccaggttcaagcgattctcctgcctcagcctcccaagtagctgggactataggcacgtgccaccacatccggctaattttttgtatttttagtagagaaggggtttcaccatgttagccatgatggtctcgatctcctgaccttgtaatccacctgcctcggcctcccaaagtgctgggattacaggtgtgagccactgcgcccagcccatgatctttcttttaaaggcagttgcttcatttattttacaaaactaatgacaaaaattttggttagacttttcattctgtcattgaagaaattcttgtgctctttgtctgttggtaagtgttactgctcttttttttcttatagtaaccgcatatcagtgttgttccatctcctttgctaatgctcaatactgaatgaattgggtcttcatgccttaggtatattagcagaggtgtttgtgaggtgggaagatctaggcagtcttctaaacttcacatctgaaaggtgttctcattaggtggttccacagagacagtgtacttgctgctaatatggccccttcttcaatctgtctgtctattatgaatcaatcaatcaatcaatcaatcagtcatctctctgtccatccatccacccatccatccatccatccatccatccatccatccatccatccttctttcttttctgcctctctagtctaaactgtatttaggaggcttcagcagccagccctactcactgccatactccttctaaatttttttttttttttttttttttttgagacggagtctcgctttgtcgcccaggatggagtgcagtggtgggatctccactcactgcaggctccacctcccgggttcacgccattctcctgcctcagcctcccgagtagctgggactacaggcgcccaccaccaagcccggctaattttttgtatttttagtgtagacggggtttcactgtgttagtcaggatggtctcgatctcctgacctcgtgatccgccggcctcggcctcccaaagtgctgggattacaggtatgagccaccacgcctggccactccttctaatttttaacacatggtgaggtgttgcatattggtatattctactgttattgtaacttcttttccatggtggtgtatttttgttggtattttctgagaactgttaatggtaagctacttaacctcactcttcacttcattttctccttaatttatttccttttgcttctatcagacctttgccctattgacaggatagttgagtataccaaaaatacaattttagcattgcagggtgccacacatgttgagaaaatatttttgccagtgtctttggaaatttgcccttgaagaaccaactattctctgtttcttttttttttttttttttttttttttttttttttttttttttttttttttgagacggagttttgctctgtcgcccaggtcggactgcggactgcagtggcgcaatctcggctcactgcaagctccgcttcccgggttcacgccattctcctgcctcagcctcccgagtagctgggactacaggcgcccgccaccgcgcccggctaattttttgtatttttagtagagatggggtttcaccttgttagccaggatggtctcgatctcctgacctcatgatccacccgcctcggcctcccaaagtgctgggattacaggcgtgagccaccgcgcccggcctttctctgtttctttataatgatttttctgtacaatatcagttgcctttgggagactatgtatgcttggaagtgtgaacattatatctgttctaacttttatgattaaggagtttatttttttcctcatttttttcttttctttgttgcttttgtgtaatacccagcaagtggaaggttatttattctgatgccttgtttgtactgtaatttgaaaactgacattttgggataattttatttattttattaagattttttttgtattggtggtcatgtatgtagtttaaaatgaagtgtggatttttaggctataaaattagccagggtttagaatggtaaggtggataaagcacatttactttttttcctccatttttccttttgaatcctgatgagtattatctagttttcatttttggtaagttctccacattcatggactgctttgttactattctgaccataaaatgcttgaatttagagttctatgtgagaaaagtgatccttgttgtgctgttatgactaagcatattgtataccacagttaggaaataaaaagcactttgcttcctgagataaatcatctatatgcatctatccatgtatctatcaattcatctatctatctgtctatcaccttatctagtactattccctcaaattaaggaaggcttgagctctttcttataagttgctaactctctcattgaaataattcattccctgaattttgcaaaactgacatccataaatttgtgatgacccttgaagatatgattaaaaaatgaagaaactgttctaccatgaataggctaattgtaactttagtagccttgtgatttttttttctctaaatacccgctgtgtccatttgtcaaagatccttgcaaatatttaaattttgcatataaaaaatacctttcaaagaatatttttatgtctgcatttttcttttaccagtgacatttcactgatcatagaaatgaaacccagagttattgctatatttatgaaaggatgaatgtataattgattaaggagatctatttaatataaagcttataattagggtcatgataaagtcttgaattgtaaatatatgttgtatttattgaatagaatgcaattagagaatacaaacctataaaatatgtaatattagaggtggaaacaagacaaagtttctttgacaaaaaggtgcatgtacatagatttaggtcagagattgactaatgcttaaaaataaagaaaaaatgaatcaatttaattgagataaatgatccatgattaggataagagaaagtctagctattcaattcagagttcacttgaatgcatgggctgctgtcaagtttttaataaaagtacagagcagcttcctaacagaggtatgaataataagtttatatgtctctgaaacaatgttaatataattgaatcaaagaaataattaaatgtataatagtcttctatttaaatttgttcttaacagtgcaatttcttatttaaattctgtattatgaatttaattatttttgtcaagattttaaaaaatcattattataaccagttggcaccataattacttttagggaaggaactgtgttgggtgcggggagcaaaacttggtaagtcacttgggattaaaggtgtgggactttgaggatagagcctccgtaacaggataagttattctacatgagaaaatgggaagtgtttattttgaactactatatggattgggattggaggctgaaggcagtcttctaggtatcaaagggcagggaggttttacctgacatatgaattattgtttcatgtaaatatagttgaaagtcatatatatttagaattttaaatacatagtttcaagacagtgcttttaattttttaagaaaatatgtgtcatttattttttccaaagctagtggaagtttctttgtgtcctaatagcaattgcgtgaatgaaatcgacatgaataatacttccagttagattttcataaactgacagatagtttcataaatacccaatatgtaatgatagtcagagggagaagctatattaagtgtgtatttcaggagagattgtcctctggagcatatactagcatcaggcagctgctttatggaaccacccaccaattcccttgggttgttgttattattgtttgttttttgtattttgtttagtttctagggaacataattttctttgtgtttctttttgcatgatgctgaccaagtcatgttcataaatcacatatgttgatatctacagtgctttcattggccttccaactcgagcatggcaaaatatgcttattttccttcagaagcgcatctttgtgttaactaggcattaacaatatgtgcttaatagcaattatcttatttctaaggatctcagagttggtttggcacattgcctcagtgctcttcaaacattatcagagaaggacaacataaacaataagatttacactgtaaaattagcctccacttacaaattcttttatcagccaatccttatcttaataacatatattaccttttattaaagtaaatatgtccctcagctctagcttttttctctgtatttttatgtacatttatggagttttactgaaatatttagaagactactgtctaaatacggttctaatttttaaaatgcataatctttagggtaaagtcttggagagtggcaagtttaatcaaacagtaacgctatcagagataaagatcataactcgcattaaattctataatttaaaataaactatgtctggtatgtattcagaaaatgtcagagctagaacatttagttcagtctctatttcatgggttaaagaaaagaaagcttagaacagtgaaaatacttcctcaaggtaatacttacagttcatggctgaagtggtaataaaagtcacaaccaactttttcctctctgctttcttttctttctgttctgtcattttaagtttcttaaaggaaaagcttagagaaaattaagtattgatgatagagcagatacaggattttcaccgggtgcagtggcttacgcctgtaatcctagcacactgggaggctgaggcaggtggatcacttgaggtcaggagtttgagacaagcctggccaatatggtgaaaccctgtgtctactaaaaaaacaaaaatttgctgagtgtgatggtgcacacctgtaatccctgctactcgggaggctgagccaggagaatcacttgaacccaggaggtggtggctgcagtgagccaagatggcactactgcactccagcctgggcgacagaatgagactccatctcgacattaaaaaaaaaaaaaaaaagaaaaacaaaaaaaggattgtgttaacatgggggcctgggtgagaagagaaaatttatttataggaggacatgtaggaagggcactgaagattactgtttaccattttgaattgtccctgctccagtcttacaaagtgggacatgcattgtgtttcttgggcatactcacttccctaagaataagctgtatcatccaatgctatttgcacagaactcacggctttatatttactgtcctaaaataagtgatttacaatcttttaaactttaaaacagtaaatttgattttcagcgatgcctttttttttgtcattttaaggccccctccaaagtgttgtaacctagctgaatgaaaaataagtggcatttttgttgttattgttggtgatgatacttttcatggcaatctttgagatacctaggaatattccaagtttttgaaaaatcatggttgggaattaccactctggaaacagattgccatggttactgtgttaatgctgtgattaatgcgtcttttagtcttgtatgtgtgtgtagatgtagacataattctatattctagtttggttaacatgtttgatctttttctatcagtcagagacataaaaatgtcttgactctcttaaaaacaagactgttcccattttttaacctaatggatatttgttgctgaggatcatttttttgtaaggagtgaaatacccagaaaactaaagtggtctagaagataactgctagttctacatttttttttttgtctgaagttgtgtttgaatttacttcctttcatcacttagtattaaaagaacagtgtgtcaattatagataagaattctacatcccctgtctttccctaagtacctgcttcgaaaaatgggtgcaactagactcagtagctagatgtggtatgtggaatgtggattcgttcgtatcaggcatgcttcttataggaatcctttaatgcactcagtcacccagagcagtcaaaggcctaagctgcttcatactttatagcagggcacagtcacttccataaatactgtgcactcccaagtaaatccagaatgtttgcaacaggatttgtgtaccatccccaattctctgttttcttcaataaagtctttgtacacaattgtttgattgtttttatctcttgatactcacaaataatgccactggagaaataaacctaagacatatccaactggatcactttatatacagagatataacatttcaacaacagaagcctttcttgttgaggggatgcacatttggaatactctcaaatgattattcgaaatcaagaaaaagagccaatgagaaacagcaaaacacaaatatctctaataaggaaaaatatttctgcaatgagatttttcttagatatatatgtgatgattaagagcatttgtttatattgtaggttcttgtcctaaacttacaatagtaagtgtagacaacactaattgttatggtaaaaggtgctacatgtgtgtatgtatgtatatgtgtatgtatatgtatacatatattatttggatattccagtcagtggtacttactgcccttggttaatgcataattgtcttgagaaaatgattatatgtatcagtgtgatctggctaaaacaactctctccaactgatcacctgattttgtttcatttccccgggtaatctggtaggtggccatttcttttctttctagtctatgttccctcctaaagataaaacttggtcaaacatctatttatggtaacctgtctttaagatagtttcaggcataccttcttcctttaatctcatttggttgatatgttagatcctttcctatcagccagagaaataaaaatgtcttcagtgtcttaaacaaaattgtttacattctttaattaaatggtcattttaaggagagaaatgctcagaaaattaaactgagtatagaaggtaactgctaattctacatttcttttctgaaattgtgtcttcatttgttttttaaaaatcatttagaagctgtgtagcccacagagaagttctcaagtttgtggaaaagaaataattaagtcccgaagttaggggtagaagagaatggagctttgttggtcaattctgacatcttagaacacctcagtaatgtggttctttgaaagcatcaaatcgctgcggttactttagaaaggtcatttttagaatgcttatactacttttcccccattttgaaggtcaactggggtttattttaagttagtattgatgtaaaagatggcacaccctcttctggggcataaatgcttgaggatgagccatagtcatgcatgacatgtgtcaagataagaaatggaaatttatctgcagagactaccatatgatgtatgtgtaaattttcagtccctgggattatgatttttttttttagtgaagacaaatgttttttgttagttagatcctgatttttggcatgatttagtaggagaaagaaggttttagtttagacatagcttttcttacatcttgtgtaaaattgtcagttatagggagggtaaacactgcactctggaaaggccttctggaatgtccttatttctgtgtgagtgtgatggaaaaaaataacttttaaaaaaatacatgtttaatgaaagatatttccaggttattccttctggattttaatttaacgcttgtttgtatctctatgatagcatgtatgaaaatgtattttaatgatttaattatctccccatattagatgatcttgctatctttatcatatgccctgtttatttttctattcctggtgataggtggagtgactgatacattgcaggtacataatatacatttttgagtagatatgtgtatgattaattgacattttgcaagcctttttttccaacttttaagttctggggtacatgtgcaggatgtgcaggtttgttacatacgtaaacatgtgtcacggtagattgctgcacagatcatcccatcacctaggtgttaagcccagcatccattagctattcttcctgatgctctccctcccacccctcaacagtgtgtgttgttttgacagaccccagtatgtgttgttcccaccacgtgtccatgtgttctcatcattcatctcccacttatgagtgagaacatgcaatatttggttttctgttcctgcattaggcaaaccgtttttttgtttgtttgtttgtttttgtttttgtttttaaagaaaaaagaaagacatgctatgaaatggccttggacctaattcaagaaacgaaagaaagtcagagatcaaggaagaaaggaacaatgcagagtttatggaagttagatgttaagatgacagctgagtatgcttcttttctcctcacccttgtttagccaggtgcttacttgacaatttgtaaattaaattattccttgaacaatattttgcacaggagtaaaggaatgcttcatggataaacagaggcaatacctggagctaatctttgtggataaatgtgtttattttgattcctgaagctgggatgcagaactgatagagggaagccagggggttttctctgctccaccaaataaatcacatatgactagaaattgcaaccagacagcaatctgtgaagcaagtgataggagctccaccgtctggtgcctgctgtggatgtctggcacccattggtaccagatttggtgtaagtggggcttctgtttaggaaactttgccaatttttttttcttgaaaagtggattttggctttgtttctgcattcttatatgggaataaaaaaatctcataattgcaaatgtgtttattatgccccaaacattagatctaggctattctttccataggatattgtaatcctgtgtgggtacatttgctgctgcatttgacacagtaaagttgtattaatgtttttcattctgctatcttttagaactaagataggcataattcctaatttatctgtgctcccccttatgcatacatttaggtagtcaaaccttgagagtttctatagaatatttttaaaacttacctttggtctgtcttatccttggaaatgttttcacgtttgagagcatcacctcctatcagatcattctgttccttgaccctctccctctgacaaatttcacatctttcttcgcaggaaaaaagaaactaaggctatatcatggctttcttcactcctcttcattctgatatgaacatttgaagcaagcattgatttttttcttccttcttcttacttttgccagaacccatgatgctgtttattctggtggggtgtgtgtgaaacgcatgttgcagttccatctctcttgaccttttctttgtttgctatgtatattgcatctcctcagttgtccaggttatcgcaagaaattgtgctggatttctactcgctcaccttctatttcttactaaatattccttgttgtatcataatccctctcaccagaattcctcctgtgtgaactcatagattacaatctacattgctgcaagagactaccaaattttccatctttctcaggtttctgcaccttcactcactcttatatctttccaaactttcctttccatctttcttaatgtcaaacctgattagtcattctcctgcttaaaatcttccaccgagttctcagggctttcaggttgaagttcaagctcattagtgtgacatacaaggctcttaggacctggtggtctcagcccctggctacttccctaaaacactgcccactcagaccagatctaactagttttagttccctatatcatggtatactactgcgattttccatgtgcgcttactttactcccaggtctctctatcctcttcctcttcatgtaactaatttcttcctggctctttgacactgggcatcagtgtcatgtccccagtgtctaatgtgatgtctttcatctgttctcttataggcttggatgcatctccttcctgtcatcttactagtattattgttcactgtccttccacggtggcacagagtccccagggtatatcatagtattgtttgcaaaggtctactaagagtaaatgagtaaatgaatctaataattttttattgctttaagtgctctgtattttaattcactgcctatcaagccttgctctctttgaattatatttatgtctaaatgttcatgatagcatcagattgaattaattgtagccttatatattgactctcaaacatgaccaagactgttattgttgactctatattcagacaaataaccagacacatagagtaaaagagttaacccatagtctgtatgacctaatgaaaagagcttagacaagaaccaaggagcaacagtctcaaatgtcagatgcctttgccatattactcccatttctttttttatagttaaaaatgttaaattttaaaggttaatgtgatgctgctaagccctctgtagggtgattgatcagcttaaatgtaaactattttggtgaccatgatatataaagtcatagtgttgaaaaaattcaacaatagttagaatcattttaagaaaacaacattgatatatgaaaatattcacaattgagaaatcttatattgatgaacttagagattatacattttggtcttgaggcagaactcatcttagtaaaactgcttaagaacttaatcttgatcttataaaataaataaagatggtattttgtattttaaactattgagtatgatttcttgctgggatctatcactatgaaaagtgattattggtttagagtggtgttctcgttattttgggttttgaaggagcacagttcatcctgttggtctgtgttaaccaggggtaggtaaagaggacagaggacacctagcaatggctcaggtattatcagtgagcagggtgagaaaatccttgtgtaccaagaggaattttgtcatggatttgcagaactttcaaaaacaagaaacattatttccacttttcgtgtgattcctctcactttttaacctcttttctcttttccttcttttcgagatggagtcttattatgttgtccaggctggagtatattggctattcacaggcatgatcattacacgctacagcctctgaactcctggctcaagtcatcttcccatctcagtcttgagtaactgggactatagatgtgtgctgtggtgcctggcagagcctcttctttaactgtaatagacctgcttatcatgcatgaaatgatctacaaacacaaagtaccctatcatcattatctctttggagtactatgtcctttaaatgtattttcttactgtaactaactacctaggctggaggtcctatctctaatttagaaatgaagaaagtgagacctacttggattgagtgagcattcgaagtacattcagaagtggaaattatttttaaaagttaaatggcttctagaggtcatgtagtctcttttgtcatatagtggagaaaacagagaagttcaagatttccccaaacgttcttagttactggcaaacaggagctaaatgtcattcttcctggattttagtcagtatttgcttggtcacttttcttagtagagctttttcttctccttgcattcataaacacttaataaaagtgaattgataatgatcatatatattatataattaggtaatattagccgggcatggtggttcatgactgtcataccagtttcatatattagaagaaaagtacaaattgtgtagctactcaagtgcaaaatgtagagagaaaacctagagaagacatgaaactctctccttgactaatatcttcaggctggggatactatgaacaatggtgtgttcagaaagaatgaacaaaattgctgtagtaactcaatttcagaagagtttgaccctgtcagaatcatctactgtatttgcatgagaaatatgaaaggagtccaagggaaagatgatgtgttcagtgttcttttccactgcattggagcacctgaggagctgaagagagaaacttgtgtttcttctttgagtggcaagtgtgttagttaatatcatcaggcagaacatgctttccaagagtttagtttgctccttcacaaactaaaatactctgaagtgcctgattttatgcaaattacttttggttgttgtattgagaaatgaaaggatgccaacatttttttttataaaccaaatactaattagcattaccaaatttatctgttgagatacaccacttatttgtaagagaagctctttgacaaaatgaaagaatatgaataaattcttcacactggctatatgagaccttggaatgtcattttcttttttttctgtagaatttgtgtaataccctccactttgttggactgaatgagatgcatacaaaacaaccttgtaaattacagcattctaggtcagaggctagaaatattttctgtaaaaggcaagagagaaatattttatgcttttgtgaaccataggtctctgttgcatctactcaactctgccattgtagtgtgaaagcatccatagatagtacataaacaaatgagggctgctctgttccaataaaactttatttatagatacagaaatttgaatttcatgtaatcttcacctattgtgaaatgttatttttctcttgatttttgtaaccatttcaaaatataaaaaatgactcttagcccacaggctgtataaaaacatgtagatttggtccaaggtctgcaattcactagcctttctccaggtgactgcctcactatgaaacagttccaagtataaagggattaggatatgatgctgatgttgggattgcatttactgagctatctaggtgattgactccaggctctctctctgatactgagaacatgccttggcatatgttcccagctaacgtttgagaaaactcattttcggaggaataattttctgttgtttgttgctgggagttgggcagaatatctcaggtagtggaaggaggatactgcaccacacaactcatagaactgaattgatacagatagatgtcagcatttctgtgcaaaaacaaatgtttcaaagttttgaggtctcagcacttttccaggcacagcattctggatcttggcacacagatgactctcagtttgaatagaaaatgctcacctttctttttgctagttttattccagagccaatctctttataataaagaaagcaactgaaaatggaaaactcactgagcttaaagcagccaaaggaaaaatatgtgctcattttaagttttttcttttgcaactcttggccaaataggtttatttttaaatacttttcacaatttacaaatgtttgccttaggactttgtgtaatggcattggttttatacagctattacagttagggtgaagagattttcttcacagagatggttttggaaaatgtctcatcacacaagtggtaagtgtagtcgctgtaattgtattgaagaaaagaaatgactaatgggaatcacaaaattgtgaaattgatgatcatttctgtttttattgcctttattttaaacataatagtgacaaagtctgaaacaatatttggagattgctacatatttaaatatttaatgcaacaagcatcccactttattataggagatagaacatcgactgtgcctaacctaaattacttttccagggggttttagtggattattttcctattaaaaaaaggggaaaaaagaaaagaacagtctggtacaaagtataggtgacggcttcagctttgtaattacctattaattgatatctgtatataagtataacaaataaagttttaaatactgaaaatgagatgagagatactaaaggaaacaatttcctgagaagtattaggttagactgtacaaatgtaaaaaacatgtcaacaacctggcagcaagtagtcttgagaccttgaagttcaatgagagcagatgaattgtctgctcttttaatagtaataaaaactatctaaggcaaaattttggcatgtaacttaagaaacttaaaaagtttctcatgctttaagacactttgattttattagatctagaatgaggtctgggaatgtatatttttataaagctccactggtgacctgggtcaagttttgcaatacagaatttgaggcagataatattatgtaggaggtaggagatttattggggagtgctagaagtaccaataccagtgggggagtgaaaaaagcatgtctgtagagcagaagaagctggactgcagagcagttgcagtagaatcccatctgatcctaaggagccctggagctggcattccaggccctggagagttgtcctggaatgaggcaaggaggagggtttgtacccttgcattcatcagtcatgggatacaggatgccccagggagtgggtgaaaacttgagggagatagctctttccaacagagggtagtgtccagagaaggtctggttatgaggtgtcagaagccaacacttgcaatcattggacgaatttcagtcctgaagttgtttctaggcagcacaccagtgtgtccattacaacaggctattcttatgattgaaaaacgattgtctaaggggttgttgggaagaagtacttggactggagggtaggcaaggagtatttatctgtttcttaaacatgtacggagtgcctactatgtataggtactagagacataaacatgaagagataagttccctacatttaaggagcttaccatctagtgggactcagatatgtaaataaataattaaaacataattgtcaaaacaggagggtatgtggtatgtgcatgtttccaggttttaaaaaagctttacttcacaaacaaaaatgttctgttcattctgcttattttgatttgatagattacagctcgcagagctaatattctcttaatgtaagtttcttccccttcacagatgtttttccatctcctctaatttctcatcgttctgtgatgagacaaccagagtctttaaaaaataaatactttgcttttctatgattaaatggtttgatgaaaattaagccataagcataaagtgctaaatagaataaacccctggcacataaaatgggtaggtcctgatatcctctttcaattcttcaaatgtataggtagatactgataccctgtctcaactgtagtcaattacactatatattttcctctataaaatgtatcactggccacgttcagtagccctccattactgaatggggcaattattcaagaatgccccagtgaatgcctgaaactgcacctggtaccaagtcctacatatattgtcttttttttatatgtacatacctatgataaagtttaatttataaattaggcacagtaggagattaacagcaataacaaatacaatagtaaaacaattgtaacagtataccaacatcactgctcttgtacttcgaggccatcatgaaggaaaataaaggtgatttgtacaagagcactaggatattgtgataacgcagacatctcctagacaggatctactggacaaagggatgattcacgtcccgggtaggagggggcaggacagagcgggacagtgggagacttcatcttgccacatagaatagtggataatttaaaaattaggaattgtttacttctgaaattttccacataatagtttcaaaccaagggtaactgaaaccatgagaagtgaaactgcagatatgggaagactcctatagaaaatatttgggctgggcatggtggctcatgcctgtaatcccagcactttgggaggctgaggtgggtggatcatctgaggtcaggagtttgagaccagcctggccaacatggtgaaaccccgtctctactaaaaatacaaaaattggctgggtgtggtggtgcaaacctgtagtcccagctatttgggaagctgaggcaggataatcgcttgaaccccggaggcagaggttgcagtgagctgagatctcgcaagtaattggttatttactacataaaaatgttacgtagtattcatatttatgtttgattgcatcacttttttttaaacttttggctcaaatattggtagttttcaaggaacttttctgcagcattatatgaatatgatgacaagtagaaaaaccaaaagggtgcatcaatgtatgaaagctggtgtgttaaattgttatcatcattaacaattcactgctgcatgctaaattcatagctcacacaattcaatttatgccttataaaattacaaactattacaagtcatggactttaaggttgctcaccaagttatcaagaaggtcaaaggtaaatgcaactgtactattctatggtaatttttcacaaatcccattgattcttgtttatgatactatttcataaaactcagggtcatataataatgttctgtttcaaaacatgttggtgtatttcaaggtctcagaaaaggtattgaaattttttggtgagccaaagagaacaggaaagatgatgttttgtctgtaaattccatgttgactctgagttagaagagactctaagggtcatctggttctgggctgttagttttgaggtaataacgttttcatttacaaaaagaacattggtaaagtaataaaagcttatttttgtatatatacttatttacgcacagattatacatgggaaaaatggtgcccaggcagtttgctttcagtgatatatgttaggtgaaggtcaggaataatattgacataagtaaatattggaatagaaggcaagacttggaggtgggatttaaacaaataaacaaagttttttttttttttcctttttatgctactttgcaggaaggtcatgtcaaaattaaaatagattctgctttctaccttggcaagtaacatgtattatgcccactcacatgtaggtcttatctgctttggcaaatacttacagaagaaagtgtaatttggaaagagaagaacataatgatattagacaaaatagggtcacaaaaatttacaattggaaaatgatttgtaagttaataaaattacctagagccagattctactgtctaaatataccactgaatgtaaacaagcttttgctgagctagtatagacaggtttgaaaaacttggttttctccagtactcactcttatcaaggaggaaaaaggcccagaaaaaaaattctgaagagtatttttgtatcatttacttatgccccatctttttctcaaatatatttaagacagtttatcagaatacatactatgtaagaaaataacataaataaggaaatcagggcaaacagaatgtaaggttttgaaaatgaaaaaggatctggggaatctgaggataaagttaacacaaaaaatgcttgaggatctgttcatctgctgaatgacggttacaaatctgtaaatattctgatagccaactctaagagaaaaacacagttatttcaatgtttatagttatcctggaggagcccaattctttctctaagtgggaccagagaaaaatttcccctttgtcctaagaaagaattcctacggagtatagggtaatcaagaactcatgaagctgtgtgtcctgtaatgccccttaagtagttagatgattgcaggccaagagcaatacagtcaaactgattttaccaggaagaaaaagcagtcagtccaaaaacaacattcttgtggtttgattaatccaaaattggttagattcaggaatggaaatctgcatagactttaggcaaacctcaataattatttctgtaaccaagattctgataattgttgaggaagtagtgaattcaagcttatgctctctgtacttcctgacaaatccttggagtgcatcactgctatgttgttagtgcgtgtggacccatatgcctttgatatttgccaggctggggatataaatgacatataaagatgttctaatgagggctactcactctcttttctctctcacagacacattcactcatgcccatgtatatacagataatcatatagacatatatacacacacataactattgaataatttgttgtttaaaaaatatgtttcaaattaatggggaaagatagattggggaacagatgggcgtcagacaatttgctatcaatttggctagaaatcaagttagattcctatcttacaagatatgcaaaacatagaaggattataaagtcaaattaaaaaacaaagtattagaagaatatatggagcatttttatactcttgcagtagggaaagatgctcagagcaaacatgaaatccagatcccataaaataaaaatacgaagtacttaggcaaaaaccaagaagaaataacaaactttggtaagacacaaatgatagtaaatgtataaaagtcaatataagtaaaattaaaagagaagtgataaacttggaacatgtattctaaacatacaacatgaagaagcttagtatctatgatttttaaagaatgtcaagatattaatatacaggaaaaacagcagaatagaaaaatgagtaaagaacatagtttttttctttttgaattaattgaatttgaaacagcggtttttctccttcgaggagtaggacttttcacaaagcttcagtggattgttctaaatactggaaatgatatggagaagcacgtctcatctttctggaaagcgatttggcaatgtatatcaaaccttaacattacaaatgagcagacccaacaaatgttcatataaaactcacacctaaaaatataccagacatgaaggcaaagctatatatacaaagggtgtttacagaaatattattcttatgtcaagtgtggaaaatactaaccgaagtccacatgtccaactgaagaggaattagggtttaatgatttaagaagatatcatgaaactattaaaattatgtttaatgttaattatataggaaaatccttgaggtaaagttttaaaagtaggatacaaaattatgtcatacacacacacacacacacacacacacacattttacaaaaaccaaaatatatgtatgatatgtattgttttacacatggagagatataagtatacacattataaatacaaattaatacttttggtcatacaggatgtctctgttttttgaaatacatttttcaatagttttgacatttttagccataagtatatatcaatagtgttatttgaaaaatatttaaacagaacataactcagttaatatatatgtactaaataaatttataatttttaagggcagaaaagcataaatatttcaggaaattctgaactaaaacacagttgaaaacttctaagactctatatcaatatgcaattgcaatgttaaataaaataaagatgttagcaaatagcacaatagtagttggcatattggaactagaatttcatcacgttatttgcaagacatctaatatgagtcatttgacccaatattttccttgtcttactctgggatgatgatacctctgtcatggggttgctgtgaagagtcagtaagatgtaatcaaccagcgaatgttaggtgctcagtacattttaattcttcatcctctttctctttttcctctcagcacagataccagatgtaaaaatgttatttatttttttcctagcactagtaaggagttgaaagtttttttccataaaaacagtgcccagttcttggtgatgacagcagggagacctttctcactcctcttcagggtgaaggtcagtgggttcgttccagttcattgactggttgttcacagctgacgttatcacgattagacaatgctttgccttaccaattatttaacgtaactgtgcttctgtctttgctcataaaaactctggtttggatacttcactcattgaaagcagcagaggcaaatcatcaggtatatatacagcttcaatgcctaagatattgggctacttttgctagttagcctgtggtccagtagccgcccccacaccccaccatctatttttggaacgtatacaaatggagaaagatacattaggttcctccattttaatctagttatttttttaaaaaaattataagtatgaattttaggctgtaagtgtaattttgttagatggatagattgtgtagcattaaagtcaggacttttagggtagttaccatccaaataacatatattggccagagacagtgtctcctgcctagaatcccagcactttgggaagttgaggcaggtagattacttgaggtcaggagttcaaaaccagcctggctggtcaacatggtgaaactccatctctactaaaaatacaaaaattagccgggcatggtgatgcgcccctgtaatctcagctactcaggaggctgaggcaggagaattgcttgaacccaggaggcagaggttgcagtgagccgtgattgcaccaggccactgcactcaagcctgggtgtaagagtgagactctgtctcaaaaaacaaaaaacaagtatattgtgcccattaaataatttctcattatttattcctctcctatgtccccacccttctgagtttctattgtctatctttttatactctgtgtccatgtgtatgcattatttagctcccacttgtaaatgagaacatgcagcatttatgtttctgtgactgacttgtttcaattaagacaatggcctccagtttcatccatgttgctgcaaaagacatgactttattctgtttttttttttttatggctgaatagcattccattgtgtacctattacatttttttttcccagtcatgcactgatggacacttaggttgattccatattctttgctgttgtgagtagtgctgtgttaagtatacaggtgcaggtatctttttgatataaagatttctcttcctttgggaaaacacccagtagtgagagtgcaggatcaaatggtagttctttaaactctctaagaatctttacaaaatcctgccactgtaggtataaaacaatatgtggtctcacttagaataaaatggagacattttaagaatgtgttgtttgaatcctggccatgttctttcccagaggctacagtttggtgtagttcactggatgtgcctgtggacactgaacttgactggctattggatttctgactcctggaagattttgaggagttgcagctcttgttctctttcatctcccacccatctccagaaaagtccaggttacacctgtggaagggttaccagccagaggacagagtgtgaaggcttgcctggtaatggcaaacccagttgccatccacatgtcatactttgcaccatgtccctgatttgtatgggttctgtacatgtcacagtttctaagagtgaacctctctgcccccccgcccacatgactctgctgtcagctttccaaacaatgagaggacagctcctttgaaagatgtaagttttccattccgaaagatataaatttcctggtcctgcagaggctagaaatacctcttgtttgggtcactggactcgggctaggtgatctgcaagatcttacacaatgctactctaatatttcctctgtctccagctgtttcatgactccatccctgccatgtgtgtgccttaccatctttttaagcagagcacaggcctgggcagtggctcatgcatgtaatcccaggctttgagaggattgcatgaggtcaggagttcaagactaacctgggcaacatagcaagaccccatgtctacaaaaaattaaaaaaaagccaggcatggtggcgcgtacctatagccctagctgcctggaaggctgaggcaggaagatcgcttgagcccaggagttcaaggctgtagtggaccatgatcatgccactgcactccagcctgggtgacagagtaagaccttttcttacaaaaataaagaaatagagtacagattgtaactggcaacagtgagtctgtctcctccctttcctcgggcatcagagtcaaaagaatgacaataacatttgctataattattttaagtttttttaaatgatatggcccacatatagaaaataattatcatgttgtcttctaaaggatttgattactagaattagataactgatttctttctttcaaaaagtggaagcttttttttgtttgtttgtttttggttaactgcattttaaattttaggaacaagtagattcttcttcagtcttaaacttcagcacctgctaaaaataaggattacgtattaaacattatattttcccccagttttctctggatgttactgcaaaaatttactcactctcatttggatcacaggggctgataaatgtgtgtgtttccagatgctgcaccaggactgaacctgtggagtaggaaatgattctaccttagatacacataccctcctctcctgtttttttattctaagtctccctagcctcttaggtttttgtttgtattaccctccctctttcctgcttccagccatccctattatgactctaagggtcccatgaaagattaggtcatctgtgatgctgtcagaggcctggagaagtcctccacctatgtgtgcgtcatggacacctggacacaggctaaaagcttcttgagcaacttggtaatggccttctgaaaaaaaatgcgctcagccaatgtattactaattctactgggggaatttccaagtcaatttctggggactgagagtggtacagaaggatgagggtgtttaggtacactttaaattcacagtgtatgatgtgccctgaccacccccatcctccacacacccactacttactcctaaaacaattttttctaagccaaaagtggtttatgacaaattgtatgtttgcagatttggagtctaaagaggagtagatttatttaagggccatatttagtgttagtaaaagctacacttactatgctaattgcaacttaaattagagctttacctttatcaccaaaaaaaaccccactgtcttcccttgatgttaaattgtaggaatttaaagtaatttaaatttctattttttctacatttccgctttttgtatctgtacaatatgattatacatgtgaatggttaacaaaaactgtatactttagtctttaagtggaacctcagtgcaatattttgtaggcattaaaaatgataagcactttcatcagactattagttttcattttgttgactttgtttgtttagttctttgtggtataccctgtagttataatgaaatgatgtaaatctatatatttgccaacacatagatgtatttctttttaacttaactttttagcattatgcaggaactgctgctcactcgctaattatcccacagcctcgcaagatggcatctcctgttttctagcagatcaggatcaaaactttggaatcatttctctttctcttacacctcatatcccatccataagaaattctctgcatgtatctagaacttggcacttcttaccactttaactgctaccatccgtcatcttttgcctggattattaaaataacctcacatctgtccttttcttgccattttatcctttattcattagccagaatgagccttctaagactgtagtcaaaagtcatacagctcctttactcaaaccctccatgaacttctgacctcattcagtgtaaattcccaaggtccttaccatgaccttcaatgccctttatcatctggtctattaatgccacctgacctctttttctaccaccgccctcaggtcactctgcttcagacataggggcatcactgatgtttcagaagcactgcagaacccttgcactaactgcttccagtgctaagaatgagcttactttgtataagcatggcttaattccttactttctttggtttctgtccacatgccactttctcagtgaggccttcgctgacttccctgcatgagctagaatccactctgcacctggcagtctggacattcttaccttggcttatcctctattatcctagagatgtctgtcttcatccccaacacctagaacagtgacggacacatgatagctacctcatgattatatttgaatgaataaatctttaattatccataattgggtagtagacccaatcttgcacaggcagccaagaaacaaaaccaagaaaaaaaaacttagtttctatgtagacctgccactaactagacatacttccttttgcaggtgtttaacatctctgagtctcaaatgtctcaagtattaaaatacaatagattgaactagacaatttcaaaagttctgcttgctctaataaaatactttacacgaagtaaacacaattccactgatgtttgttcaatattttctatggcaaggccattcctcattatatataactcaagtagataagtagcagttgttatttgtcatatgtatgtatgtacgtacacacacatgcacacacaattcaccctctcccacaatatcactgtgttacacaatcctcagtcctattacctctgagacccattgtaaataaaatgtaaaatctttagagcatgttggacaaatacatggttttggttctgcctctttccagtcgcagacatcactgtgagattatagaactctttccatctaggccaagactgggtctaagaattcttctcagacttctaggaaagatatcaaacttattagagttgaaactagagatgtaacatagattttattccaggttttgggtatctgagagcctagaagtggtgtgagataaagaatttgatacaccttctccagtctttttgcttggttttccttcaattcatccttccaaactcattgtagataccacttctcctaggatttttccccaaatccaagactgtgttatgtggcccttgttatctgattacctagggccctggtctcaattacagaattattatgttgtaatttctttttaattttaacttgactgcatcatctacctgactgtgttctctagaggttcagaccaagaattgcgttttgaagactgagagctgggcctgacacttactagggacacaataaatgttgacttattgaacagataaatgaatgaatgaatgatgcccaggatagaatatttggtactgctgtcctgtctagcacatttctccaaggtaaaattatctcccacatatgacaaaaatctacctttctcttggttaaatcccttagtaagctgcctatcagagaatttgagggttaactcattcttttagaataatgtaaataacttggatgggagcaggctgtatgctttaggtcaattagaccaccttctcatgcctgagggaaattgtcccttaaggtctgttctatggcacctagtcccctaagatttgacaagaaagcgttccacagttcaatatatttggaaaacattgctcgctggcctttccccttgaaatctggccatggacattagcttattagagattctgagtcatctagtaaagaattctgtttaatttttttatagctagaatttttcatttcttttgaacttaaggataatattcaacattatatatattaacattctactggactaatgctttaggaaacagagttttacacacatagaggccatttaatagctttaaataacagtgtagcagccatatggcagtgagcagattggatttggaaaggggtaaaaccagtagggaggatgttgcagaaatctagatggaagaggatgaggcctataaccaaagtcctcatagcggccacggagaaatgaaaacgtttatgcaagaaactgatctcgttactgaaaagtcttttgcaagagtaactaaggtggttagagaacaggaggttggtactgtagtgctttccctcttctgcctttcaaaggtaagagcttgacttcgtttttaagccagcaggggttcttacatagctgagtgtctatcactacttaatgcatgtataatgccctgctgtactgatattcatgataaaaatcaaggtatttacagtcaattataatttcttattctcaaagcatacattgattttcttaaactaggcttttctgaactgggtatgataatacacattattatcataccattattaggcctctctttccaggtctttcagtgaaatctgtgtgtgtgtatgtatgcatttcctaaggctgttggtgcaaagaaacacaaactgggtggcttaaaaacaacagaaaccaaaatcaaggtgttggcagggccatgctccctgtggggttctggcagatccttccttgcctctccctgttttctggccatgtctgtcaatccttggtgtttgctggcttgtagctgcaatgcttcagtctccacctctgtcattcgatggtgtctccctgtatgtctctgtctctctctgtgtacacattttcatctttttgtaagtacaccagccaaattggattaagggtctaacctactccattatgaattcatcttaactaattacatctgccacaaatttatttccaaataaggtcacattctgaggcaccgggggttaggactttaacacacctcctttgggggcccaattcaaccaataactacatctgtgtgtgtgtggtgtgcacgtatgtgtatgtgtttgtaagtgcacacgtaagatgcaccaacatagatgcaaagacgtttgtcttcccaaatttactagtagtatttctggctctactcccatgaaattacctttaccctttctctttgaaggatggacaaagccaggtctgataaagcgttagaatttgtcatggctggtcttcacgcggcaaaccaattatgtgaccacccaggccttttcatcatgcttggtacattcatggaatgttatctcacactggggttggtaatgcaatactaattctaaaaggctattctgattaatgtattcatcttggtttagcattttttatattgtttatttcagctctcctttcccttttgtgatctaaatatattttctttcaggttattttgctaagtggttccgagctaattttattacttttttgatggtaagggtctaggcagagtagcctttctgaaaggcaagctttaccgacttctccaggttcataaatattaataatgtgtaactacgactctgtgtgctaaaacattgttgtggagattgtacaaggaaggcattttatgatttcatggagacatggagtagcaagaaaatggagcaatgacatttggggggagcatgacatctaaatgttaatattgtgtactgcttactgagaatgagaatttctcttcttttgatgctcgtgttgtcagttgcacgagagtgttcttcaatttgtactttacttcttctagctattttttttctttataaaactgctagaaaagaagccagctagtattttgaataaaagagttgggattgtataaggcaatgtttttactcagctttcctcgaccttttgatgaaaattccagttcaaaataaaaagacacaggcactaccctctgagagagtctgtgtgaccaggctatcattcttaagaaacggattgaaacttcttagtacatctcataaaaaatttagttagctataaatgttttaggctgttgcagctgatatcatttgccttgtgggaaaaaaaaatgaggctgttttatgttaagtgttttgttttctcttctctctattctttttttatatgtattaggcaatgcaaagacttttactaccattgttatgatagtatttaaataagcagaccaaacccatgcatgggactgaagagtaaagtcaagaaatatttgagatgcctcttttaaattaaaggtatattcttcattgctaattttgagttcaattttttactgtatattaaaatgttaatttcaatttcatctatagcagatggtatcctgcttttattttctaaagggattcttcaagtaagccctcagttgtcttgcattatgagtaattagagaaataccttggttggtcctcagggcagagctaaaaatagagttcagtgatttttttctgtaattcttactatttttaaatagaagaaaatgataggcaagaaagaaaaggccatacttaaccaaaatgtccatgacttctttcattactaacaaaaaattgccaagcttgacagtttgcaaataactctcccttctccatgaaggtaacttggaattcgatgtgtgtgtatgtacctgtgtgagtgcatgtgtgtgtgtgtgagagagagagagagagagagggaccacaaagtctctgatgttaacaaatacaagaggaagagcagtagatgagggcagaggtgtggtaagcaattgatctggcaaaatcttgaaagttaagacaagaactctgggtgttactctgagatgggaagtgtttcgactcagcaatcccataatgggtatatattcaaaagaaaacaaatcgttttaccaaaaagatacatgcacttgcatgttcatcacagcactattcacagtagcaaagacatggaaatcagcctagggcccaccaacagtagactggataaagaaaatgtggtacatatgcaccatggaatactacatagccatacaaagaatgaaataatgccctttgcagcaacatggatgtagctggaggccattattctaagcaaattaacacaagaacagaaaaccaaatatcgcatgttctcacttacaagtgggagccaaacactggctattcatggacatatagatggcaacaagagactctggggacccttaggggcaggagggaacagggggagggttgaaaacctacctatgaagtatatgttcagtaccttggtgccaggatcatttgtaccccaaagctcagtatagtgcaatatacccaggtaccaaatctgcacatgtaccccctgaatctaaaataaaagttgaaagtaaataaatagataaataaatgcattaacttttttcatgaaaactaacaacaaaaaacctgagaagacaggccgcaaaaaaagaaatatggaatacatttaacctacaaagaaacaatatccagaatacataaggaacatctaaaagtcaatcgtagtaaataacataaaagcaaactgaaaaatacttcaaacgacattattcagaaaatgtatcctaatggccgataaacattaaaaggtgctgaacattcttaatcatgaaaatgaaaaatagaccatactgagatgatcatttatcatccagtattaacaaaaatctagaaattatgacaataagttttgggtaggatgagaagcaatactgctttggggtatacaattgctttggaaataatttggcattagctgtaaagtttgaagatagacctatttacaggttagtagtaccaatcctatatatgctgtctagaaacttctgtacatgtttaccaggaagcacatataagaatattcctagaattactgaaatggcaaaaaactgaaaaaaactgcaactatccaccaaaagtaggatatatagataaatcaatagactgatagattggcagatagataggagtgctatacagctgttaaaaataactgtaatgcagtgttactcatcaatctggatgaatttcaaaaccaaaatgctaagaggaaagtgcaagaagcagaaaagaccatagaaattattccatttctgtaaggtcaaaacaagcaaaattcagcaacatagtgttttgaaatgcattcatatatggtagaactatagagaattttaggagaatgattaaaagagattcagaataatggtcacctgtggagggaaggagggggctatgattggagaaggtcatgctatctacaaatgtgttgttccatttctcagtctgatagtagaaagatatttgaacatattattgttcttcaaattgtatatacattttaatattttataaatatattctgcattaaaataaaaagaaaataggaatgatatggaaccagcaacgacagacaacttttttaagaattttttttttttttttttttttttttaacgaaagctattgtcttctatggaaaatgttgtttgacctattagcacttgattaggttcccctccttttcctgaaacactataacttttccctatcatgtcttgtactaaatttatgctagctgcaatgctagataacactcctccagacaggtcttagtagattaataataaatgtttatttcttgctcaagtaagaggaaaaatgagattacctataagtagcagctcattttcaaaaggtaattcaggtaccttgtatctttaaatctggtggctctgctattttcaacatgtggcttctaaggtctctgtgagaggagaaagaatgggggcttgcacatgtgggacattttcatgagcaaggcctgcattttcctccatatgctgttgacagaactcaatggcataggcccgctaactggtaatgagctggcaagtgttgcctagctgtgtgtgcaaaagaaaaagagacagatttttttttcaatagctagccattttatccatctactttccaaatatccacttaaatctttcttctttgcttaggacccatttaccaagggtgacagtccagtcccatcaccgttttgagctcaaataacaatatctccaggcagtatgcagtcttctccatccattgtaaatgtgccttcttgcggtcttgcaatctctgaattaaaaagacaagttgtctccctttcacatcttcccctctctccagagtgggagacacataacattcactggtacatggaaagaataatattctgcaggagggtggaaggggtcttttcctagcagttctccttggctcttatcactgtaggctagtgcatagccccatgcctattgtatgactgcactgtgtcagagttcaatgagttcaagtttgtactattccctgttcatgataagaactatataatagttaattgctgatagtattattatattacaacaagctcaagtaccaagtgtctttgactttggctgaaattatgtgcacactaagactagttaccatggtcatcataagctataaatggtaattttttctatatattgtttaatatgtgtgtgtgtgtgggtgtgtgtgtgtgggtgtgtgtgtgcacatgcacacatccaggaaaaattattacttgacacctactttttcttgtaaacaacaatttatagtaaatatggaaggaaatttaaagggtctgtggcttgaacatgttggaaagtcttgctttaaagctccagcagatcctttctgtactaaggcacaaaagctatgatttttcatctgcccagaataataaaattatttacaaaagcactgagaattattctttatatgatttccaaccttcaagcttctgtagaaacattgtagctttgtaaaatgtggtgccttaccttggaaaaaaaagctttgttttgaagccgaggaatagtaaagaaaactgctatgtccctagcattaaaatcttatatcctcacaatgtgaacatgcaaattaactagaagaaactacattttaaaaattgaaagatttttttctgagatgcctttgcattttggttatctcttattggtcaaccccaggtcagagttaacacacctggctctagagtaatacacatgtacaggtgttgttaaaggctgcatgatggtattctgagcctctgctctgagctctgtcctagatataaagaatgtgcagccagctgtttgtctacttgtcctgaccctgttcaaggattaatgaagagatcctctatctgtagtccaatgtctattgggtagggaccagaaatgattgaacgtctttgcttcatgatacgctgtgccagtatacatgaaaatgggaacctaaaagtactttcataagcactttgtggaacttatttcttcctttaaaatgtcctagacaccttattgtcacctcttggctccctctggtttctgtattttcactggtacattggatcaccatggcagagccctaccctgcacccaacccaatagcaggaaggtttaccttcagcttgttccctgtatgctcagtttccggtggatttattactgtttttggttgtccccagaggctggcttatcatgaagttaaggatcttgatgcctcagggcttttcacttacatagaaccttccaagcccatgggtcttgaatctttgctaaatcggtccttgctctgtatggtactgctttaactgaaacacacacaggaagctgtgtccttactttgcacagatgtattattcaacactgtgaatactgtagtaataatttttggtattttccttgtaaaacaaagagaaaagaaaacaaaatacagaattgtgctgcttttattcactgagtagtgtttcaaatcaagctagctttctggcagtgtgacatcatggcttagcaaagagtccttagaattttctaacttttaacaaaatggggaccttaaacaatctattctctgaaaaataatgttgaggtttcacagtaggaatgaaaagggtgggacgattatgatataactaactcaatttttaatgaataatgaattgcagagttaatgcttgtcagaattttccaggaattagggagaaaatgaggaagaaaattttacaagtagagttaagaggaagaggtagatgaatgcacgatcctgcttttattttatgactattaggatagagatgtttgaaacctgctgagtagctggtggaaggggaaggcttcaaggataaatagtagatggccatgcttgtcccccgacacagggaacggcctgcgcaaacacacttggtttgaggatatctgatgagttcaaagtgctttaactactaagcaggtggaatggcaggatataggagtcgtggcggccactgtaaaactcggtggttcagatgtgggtgacatgatttgcaaatataattacaaagtgatacgaactgttaaattggacaagtttagatttaggtgacagtaggacttagaagagacatctctatatttcctatgctaagctggaggtaataggagaacaaactactttatccacccctgaaaatgagactgttttactgatggaaacatcatcgtcttgaccatgagaaaaatccaagctagaatcctggccctgtggtttactagccaagattctttgaggggcattaatatttctttatgtatacattgagactctgtgatgatacctaccgcttatgcttgctgtgagcatgaatgagccaagatgtactgaagagccatgttaaatacctgtagatagttaataaatagtatctttattgttatcaagtaaatggaaagaattcaaaagaagggagaaagagagaggaatagtaaaatgtcatgagagctggaggttatttgaaaaatacatgttaatcaattgacgttatcaatcaagtaatcacgagattaccacagatacccagcttggggacaggaccacagaagaataatttgtgctgcctctcttgacgataactactttggttgaaattctgtatccctcttactttgacaaatcagaatcaagcgtggttgaatcttaaagactttttttttttctgaactaactcttactagttggcacaatagttaaatgtgtaggaggaaaagaggatgacggagaatgcatattttggtttggagagaacaaaaactgccctaggataatgtttgaatacatggccaccaacaagcccaagcttttgtggaaaaacactaaaatggctaaagcctctcagcataactgctttgctaatttaagtgtttgctttgagagtatgtgaacaaccgaattttcttagttaaatttattaaaaatgactgtacaggatggaattggccaatcagacaaaaacagttcaaaattagacgacgtttttcatcacttcacacttttgcagtgtttgctacaatcaagacactgtgcttagatgctgaacgtgatgcaaaggagttaaagatgtagtccttaccattgatttattggaagcaatagcatattacaaatactttatcttgctctacaggtaggcccgatacaagaagtgttggctatgagtaataatttggaggttcttcaaaaaactaaaaatagagctaccgtatgatccagcaatctcactgctgggtataacccaaaagaaaataaatcagtatatcaaagaggtatctacgctctcatgcgtgttgcagcactgttgacagtagctaagatttgggatcaacctaagtgtccatcagcagttgaatggataaagaaaatgtggtgcttatatacaattgagtactctttagccataacacagaaggaggtcttgttatttgcaacaacatggatggaactggaggccattattttaagtgaaataaaccaggcacagaaagacaaatgtcacatgttcttacttatttgtggaatcttaaaatcaaaacaattgaactaatggacctagagagtagaaggatggttaccagaggctgggaagggtagtgggggctggtggttggggaggtaggggtggttaataggtacaaaaaggtagttagaaagaatgcataagacctactatttgatagcacagcagggagactatagtcaataataatttaattgtacattttaaaataacctgaagagtgcagttggattctttgtaacccacaggataaatgcttgaggggatggataccccattctccatgatgtgattatttcacattgcatgcctgtatcaaagcatcccatgtaccccgtgaatatatacacctactgtgtatccacaaaaaaagtgttggaagagtgttgtgggatttcacacaaggcactgcctgggtttgtgtcactgctctgctctcctataccactcttgtcacataagcaagagacacacagtctcatatggagtgacaaattcggaaatggaaattcttttacagttaattaattcaattcagagtgtctcctcatcatcatccagcatttcctgagggtacctgttttgtgtaatgtggtaagcatagtctcttctcttatattcttccaattaattactttttctagagtttaggcccttctgccggagggagatgcctgtgtggtcacaagaatatttttctccctgcctccactttgttttggtgaccttggccatgttagttggctttattaggcttccacttcacaatctgtcaactcgattaacacaggcctccctggaatacctggctgttttgtttaagatgaatctaggaatatgacttgtttcaaatccacatgtcatcttgaaatgagcttgtctgggtctttagggttgaaatatatcccaggcttcttggctgctgatgtatatttactattttaacttcagttatctttttagtctgaaggctgaatgacttcttacagtgatcaacacaaagattatccagtagtctttggttgaatttattgtcttgacttcaatactatctatcagcaatactttgcaaggtcaacttttaaccatttttgttgttctttgccaaacattgcataaaataaaatataacctttcttctaccatattgtaatactgttgtaaaaaattaaatgatttcctactattccagtttattctctgtcaacattcttttcatactaaaaaggttggttttagcttatagatgaaatgtttttctccaaacttatttatgataataacaacaaatacttttatagtgcttagtatattccaggcactattataaacattctaaacaccttctgccattaactcattgagtcctcacaataatcttatgggtactgctaattgtgcccatttcacagatgagaagattgagggcaaagaagttaagtattttgcttatggtcacaagtgattgggccaatgtttgaaccaatcacttgtctgaaattttgcctttaactatttcacattttgcctcactgttagattttagttctttgttctgaatttggaatgcgtataaccatacaagcaaacacaaatttttattttttaacttgtaatattatggctgacctagagcagtgacatttttagtccaagacctagatacagacaacaggagatcatgtgtaaagaaaatagaataaaggtccttttttcttatgcagggccagcccaagataaaattttgtaataggttgaagtatatctttggcatcttttcacctttctctccctctctcaatttttggcactcctcctttcactttcatctattttttgctccactttgattagcagtagcctgtctaatccctgagagtaacccatacatcagacagaaactccaagtacagtgatacgggaatcaatgtaccctacctctgaccctcaaatttctcctctcagattctagcctgagaaaatatactgaaatgcaaaggtttttgcataaagatgttaatcacagcgactttcttttcagtaataaaaatttgaaaactgcctaaatgtacaacattggaagaatggttaagtaaattgtgcattatacaatacaatgcagcattatgcagccattaaaaactatgtttatgaaaacttctccatgacagaggatagtacataagtttaaatgctaagaaaattcaagttgaaagtagtataatatcaactctagaaaaatacatataaaacaaggaaagaaaaagctccaaatattaaatgtatacagattggatataaagtgattatttatagtttattccgttttctaatgtattagttttacaatctagaaaaaataaatgatcagtttttataaaaaccttcattcacaataaattgcaattttttcttaatcctcctagatatattgtcattttcaaaaatgatacttgccaatcccagtgtctttaattagtaggattctaagcagcacaagaaaatatagaaaaagattgaagaagtgtagagggaatatattcaaagtatgtagtatgtaagctgaaatagagcaaccgcaattgaattctcagatcactaaacttttcttgctttacacaaattttatctttcttaattcaattttttctttttcttttgtgctttctatttaaaagttaatgttttgttttgcattatattttttttcctctctgtgttggaagcaaagacagtaatgggaaaaggggacaagaaacggggcaaggatacactgaaggtgatatatatgatatatatatatatatatatcttcatagatggtggaattataaatggattacatatatcagatagaattaagtgtttgcaaattaaggcttgtttatactcttttgcaagcaatattttaaaatctgtttgtttattttttttatttttggaagccaagccagcagttgtttaaaattcatgcctctgcataatatatgaagactacatagatgagttttctggagatttctccttgacacatttagtttctccacgttgcttgtagaaaggatgattccattctctcaataccaccttccaccaggagaagccattttctttcctgaaggtcaacctacagccacagtagaagaggaaaccagttactgtgattccaaatataatttcccaggaggtgaaattccctctcctaaacatgaattggttacaggaaaagaaaaaagaatgtaattcgtaagactgtggagccattttcctaatccaatttctcctgtcccctagatcgatatcatgtgaattgcttccacaggggactgtgctagcagagaggggtctgtggaaagaaagaagcaccgtgctccaatggaccattattattgtttccatatcacagggtccacatatgcatgtaaatgtttttatagtacacatacacaaatgcaaaactgaatgtctaactaatgtcaagcacggtcacatacacccacactctctaatttcctgtccaaggtggtgatctgtaaaagagaggtgaactgtaagagctgaatgattagaaaataaattctaaaactcaagtgcacttaacagtggacgtaatcagtagagagaactaagacctttaggattctgatgcatctgtcacctgtaagtaaactgacagttctgtttttttaattattattaagcatgagttgctatataaatcacatctcattacaacaagccacaagtgactatctacatttttatgcaaaatgaatgctatcctactaaatgagcattgcctaatattgggagtcttttcttggtcatgcagtgatatttgctgataggggatttgacctgtcatagctttcttctagttttgtagacatttcttgttctctacctccctggttcccagcgtgcttatataatttgacaatatcttttggagcaatttgaaaatatgaatctcaggtcattggaatttgtgtattctaataaaaactggcataataattcagaagtggaattcattgaagaattatgggctcccaaatgctagtcaaattattttttatagaggtggaaagaaagggtcattctgtttttatttcaatccccaaagtatagattaaggcagcagtattctaggtcttacacaatcataggaggtgggtaacattgcaggagaggaggaaataatattcgttgactgtttactattggcaagacatcttaccaacagtttaatactctttgcaactctgagccagttggctctctctgtatatcacttttggaaaagctgaaatttgtaaattagtcccaaactctaggtcagagggtaggggagtgaaggaaggtttcattaaataaatggcccttgggctagtaattaaagatgactatgagttacctgagtaacaaggggagggaacagtgttcttagtagagggaacaacatttgcaaagaatcttcagtgggatggagcttaaaaataaggcaaacatggctgaaggacagagagtgtgggagagtactatataagctaagagggaggatataggcaggagctagatcaggcagtgctttgatggccattttaaggaattttaagcaatgggaagcttgaatcaaagactgtaacatgagcagatgtgctttttcaatacattattatagttgtggtgtggagaactgactgtgtggacacagacagactttcacttcaatcatctggatgaaacagtggtagcttagatggatgtttgtggtagagatggagagagatagagagtttggggacgatgggcagaattaatagaattcattgatatgaagatgtgaggaggtgaggaagagaaagatgtttaaggtgacatagaactctgcatcatataataaaatggatgggggtgccgtttatggagatacggaatgctcaaagacctgagttttatgaatttgatcatttttctaaataagtgcttgattaggagcatggatcacctatttggttttgaacatgtatttgccattcctgtgactcatgtaaaagaaatgtgaaaaggcagttggatctggactctagaagagaaatctagattcacaaactcgggaatgagcattgatgagaggtggagaactacaacagttattagccacatccaggagaatgagcctacaaggagaaacagaataatccaatagttaggaggaaatcaggaagatgactgttttgtggaaggcaaggtaattgatgtttcaaaacaattttgttggtttttgataatgtggaagttatgggcaagagaatgcttgggatgctcaaagaccagcaagaagaacagagtgactggagctaagtgggcaagatgattagatttaaaggttgattttaggtgtgatgagaatgcattaagaggttttgagtgaagaggggatatgacctgctttacattgtcactggactacagtgatagacagtgaaggaagcagggatggaagggcttggggggagaccaattaggagactgtgcattcaacattcagctagtatttatttaacatccagtatatgccagatatctgtaatctaggcttgtcatttggacttggacaaggaagaagtaatcaaatttgagatatattttgaagtcacagccgttgggatttgccaatggattgaaaatcgggatgtgaggaggagatgaatcaaggataatttcatggttttttggcttgggcaatagagagaattgcagtggggctgagactggtagccatagacaaggaacagaggtgaatagggagaggagcacgagttcagttctggatttgataaggaaatggtaatttttgtttataagattcttatgaggataaatgaagtaatgtctgtaaaggactttataaagagcataaacacttatcataagattattgttgttactattattagagtgggccatagtgaaaaccagtattctgatttgttgggccacctactgtgttttattcttggctttgtcactaacttgctgtgtcactttgagcaatttattggttctttctcaatctcaatctcttcctctctgaaagtttccaaagtgaacattagagatggaattgactagaagatcaggaagatcccaatcagctgtaacacccctatgatataaggctgattagtattatctcagtattattttttacattattgatattgatattttacttttatacagaagccaccttccaaagtagatttatcatattctaatgagcattgtgaatgatctcatttcagagataaaaatgttgaagggctttaattatatttaaagaaaaacagcaaaaatgaactcttatgatgaaaatcagtcatcaaaaaaaaaacctgagagatgagaaactacaacaattatccaccctcccaacatgtatgcagctattttgaaagaaaacatttggtacctgttgttagattttggaaggttacacacaaacttggaaaactgtctaaagaaaagccaagggatttttgagttttaattacttcttttaaaaagtaaacagtagtcaattaaggagccataacttgtcttctattattaaattaatggaatcatgcagtaaaatatcagtggagactgcggcattcacctggacagacactgctgttttaattatctatagagtcaaatctatccaaacaatcactctcataatgtaagagaaggaaagaaaaactaaaaactagtccatctctaatttttctcatatatcagggtttttttaagtttacttgctcttcttgcctccctgactcaatttcatccctagattattgcagcaatatcagcaactattagttattattttagttcataactatttgttattctttggatctaagttactagtatctagagtggttctgaatgaccaggtatgagcagtgtggaggattggaaagcacatattctgaagaggtgttgaactgaaacacatccttctaggtacttagctgttttgtttctaacaacttaaagatgttaaagtatgttgttcacatctgcctcaatataagtggcagaagcaacattcctggtatgaaaatatgcacccagagaacttaaaatttccttgatcaatgttaacctgctgttgcagccaatgacatatcttttacctagagctagaaggtactaaggatgaaatcttgtgggattcccatgtaatatagtctgaatgtgtgtctctgcccaaatctcatgttgaattctaattcccaatgttggaggtggggccttgtggcaggtaactaaattatagggatgagtttctcatgaagagtttagtactatccccttggtactgtcctcatgatagcgagtgagttctcctgagatctagtctttaaaagcgtgtgatgcttcgcccctctctctcactcttgctttggccgtgtgacgtggctacaccctctttgccttccaccatgattgtaagtttcctgaggcctccccagaagctgagcagatgccagcatcatgcttcctctacagcctgcagaaccatgagtcaattaaatccccttccttcaaaaattaaccattctcgggtatttctttatagcaacgcaacaatgaatgaatacaccatgggatgctgctgatgtttggatatcctctcacttctaatccctggaaagaaaaccttgcattccagagcattccatctaagcagctggaaccactccttaggtaggatctcagtggcccctgtaacaagtactatgattatagtggacaagtacaactgctcctatctattcaaatggaagaatgaagggacaatgttatagttacaaaaagtgcaaaattttattgcaaaacttcctagtaatgattctaattatctttattgaatgtctgccattttctaggcactggagtgggggttgatttggtttcccttatctacctattcaggtagataagggaaatttacgtggaagctgaagttccttactagagagagcattatcacctctaactctgaacccagtgggcactgctagttttgtagttcctggagttgcactctgcctttttttcctcacacttataactacttctccagctcctgccctggacaggcctgcactgctctgggcattctgcccactaatgactagtttttggctcatttcctccagaggctgcacagggaagagtgacctgtgtggccttatctgtaccatagattttctttcttgtgtccagctgtaatcccaatttatataaacatgtctatacctgagaccccagtcttgataccccaacatataacgtcttgctaatcaccctcacatagccctttaagaaggtattttataattaagagacttgaaactgagaggcttacttgcccaaggtgcttgggaatgcattcagatccacactgtgtttactgtactgtgctgtctccatcccattgtacattactcatttgtaattccagctgcttttgtttgagtgactagcaagtgttcaagtttcactcacatgccatactcttagaggaagtaaataacgtgtttcttgaacctcactgtgttcaggaagtactttatttaaccttgcctgcgggttaatgaatccttgctctgcttcctagggctttatgtatgattaaccaatatacctgactatatatttgaaaagttggccaaatactatatctggggcatggggttccactgcactgcagcagcgcgtatttacttgctcccagggctgtccactgttatgagagagagagaattcctactctgcattctaccccatcaccaactgcaatgtgagaagcgaatcacaattattttctcagtccctgaagtatttgctccagaaggctttatttgatgctagaaaaagattttcccataggatcaagcttgtttatggtggttaagaagaccaagaggggaagaaaatctgttagggcaatgtcagcttaagagagaagctgaaattatttattttagcaccttatttctacatacccctctgtttgattagctagacatctaaatccatgcaaagcattgtttatataacacaatctgcaagatccttacagtcatagcatcttcatcctccctcccctatgtaggcttacacaattgagaggagacaactgaagtctcaattcacgtctcacatttcacacaaagaacatcagctttttgtatcatttactctttacaaacatactattgattgccataaaaaattatctctgataacacactcataacatcctatctgttatttacccatctctgtgaaactgattatgagatttttcccaggtgactagcaggaagcaggtctgttaagggcaaaggaggaaggggtacagcttgttttgtgctgaaagaagaccagagaagtcagtgaagtcaacctcctggacacagctttttcccaagctgaccctgttgactgaggaatgccgagttacattaatgatggacactgtctgcccatcatggaaagcggagagctacatgtgtgggaaagggtagtaaactcctcctccacaactgtgcctccttccaagcttagatgacagaatattagtgtctgttatccttacgacatctctccatctggtcctctcaggatttactttatggtctgttttatttcccttttactactattagaaacaaacagctgaaaggattaatcaaaaatgttactgcttcaaagagtaaaaaacatgttacctgtttgactggtgcccatatatagttaagagtttctgaaggaagaagggtcacgcttaatagatttgatgagtccattaagcctggcttccatcttgttgctttgtttgtgcatttatttccattttggtatcttagcagtcatcttcttttagcaaacattgaggtttcagtctattgggtcagggtattagcaatacattaaccaaaccgttgaagacaaggggccagacatattcaaagtgtgatccgcattcaatatcaccattctcttgcaattgcaaagttataggcatcctttggatttttgcagcacttattttataagaaaaggagtaaataaagccacatctctgggatatgctttgagatgtttaagattgggaacattttcaggctgtctcaatactggaaatttgttgtccttttttttcacacattttctccctcttatactactctttaccaaaaggtgggtaaagataaggagatgaaaaaaatgttgcttaagtttttggttgccagctctgttttaagcctgacatagaagggggttgaaatttattttcatcattcagttaagagctattcttggctttcacaaatctcagtcctaattctgttattgtttcagataatgtagaatttgtcacattggctaaaaaaacaactccactaaatcaggacattagttttacatttcactgtgctacattctaaaataaaatgaccatttgtgctggggatgattttagaaaagcgaataagtaatataaagttttcctggttttctcatgggcagcctagaaaaatgccacaccaagactcaagaaattacattctgaattttgcatgaagataagacttgaagaaatcttatttcaacttatactttcctcagtttatgtcctgtaggaggaccctgtagagggggaatgcagaagaccagagggaagaaaatagatggtgtcaattgttatcaacacacgatagtatcacatttttattgagatataatttatatataataaaatatgagagttaaagtattaagttcaataaattttgacaggtgtatatacttgtgaacaaaacttcattaagatacagatgaattctgtcattctagaaatttctttatgcaccttcccatcctttcagaaaattcctcatgcccctcactcctccttctcctctatcactcatagaggcaaccactgatttctgtcactatagtttagtgttagctgttctcgaacttcatataaatggaaacatacagtgggtactctgttgtgcctggatttatttatttatttatttattacacctttaagttgtgggatacatgtgcagaacgtgcaggtttgttacataggtatacacgtgccatggtggtttgctacacccatcaacctgtcaactacattaggtgtttctcctaatgttatccttcccctagactcccaccccacaaaaggccccggtgtgtgatgttccccgctctgtgtccatgtgttctcattgttcaactcccacttatgagtgagaatgtgcagtgtttggttttctgttcctgtgttagtttgctgagaatgatgcaatcccattactgggtatatacccaaaggattataaatcattctcctataaagacacatgcacatgtatgtctactgcagcactcttcacgatagcaaagacttggaaccaactcaaatgcccatcaatgatacactgaataaagaaactgtggcacatacacaccatggaatactgtgcagccataaaaaaggatgagttcatgtccttttcaaggacatggatgaagtgcctggattatttagcttggtgtaatggttttgagatttatctgggttgttacatgtactagtagtttatatcttccattgtgtgagtatgccacacaatggatatttgggttgtttccagtttgggaatattatgaaggtgccatgaacattcatgtacaattttttatgccaattggctttaatgtctcttgagtgagtacttagaaatgggacggctagagcataagctaggtgcatatttagatttatgagaagtggttagttttccaaattggttataccattcttcactacctgttacccactgaatgacatactctgtgttctagccaatgctttaatgtcatttacctttttaatatgttaaagggtgtgtagtagtaactcactgtggttttaaatggcatttctctgatgaataatgatgttggataacttttcttctgcttattggctacttacacatcttcctttgtaaaatatctatgtcttttcactcattttaaaagtgaatttgtcttcttatagatttcatacatgttccttacgtattgtggatatgattctaatatgggaattgtgaatattctctcccagaatgtagcttgccttttcaatttcttaaaggatgtcttttgaagagaataattttaaaatattgataaaccctattttatcagtgttttctgttatcattagttttagcatactgtctaagaactatttgcctatcaagtttatgatataatctctttttttttcttctaggatcttcagacttttagcttatacatttatggcttatataatccatctcaagtaaatcttcatgtatagtataaggtcaagattaatttccttttcatatacatatccacttattctagtacattcatcaaaaagatgtttctctccacatttaattgcactggtgccttttacaaaagccataagtcacttatataagtgtgagtttattgatggactccatattttgttgtctatttgtctactgtatgccagtaccatactcttagttaaattttaaagttagttagcatacgttctctaactttgtttttctcttttaagatgttttagcaatttgaaatcctttaaaactacatatgaattttaacatcagcttatcaatttcttaaaaagctggctcagagtttgattggtattgctttgagtctataggttaatttagggagaattaatatgtttacaacatttagttttgcaacccgtgagtctattatctctctcaatttatttagatcatcactaatttatctcaccaatgttttgtagtttcagtgaagatagcctaagtcttttattaaatgtattcacaagcgttttctagtctttgatattgtaaattgtatagaattttaaatttaactttcaacttgtttttaatggttagtagcagttacttcctcctctgatatcctgaacccctcaaagttacccatgcggattggaatcaactttgtccaaactcttgtaaatgttaatattttgatttaaagtgaaagttgtcctgaatggtaacgcctaggttttcttctagggtttttatggttttaggtctaaggtttaagtctttaatccatcttgaattaatttttgtataaggtgtaaggaagggatccagtttcagctttctacatatggctagccagttttcccagcaccatttgttaaatagggaatcctttccccattgcttgtttttctcaggtttgtcgaagatcagatagttgtagatatgctaccattcaggacataggcatgggcaaggacttcatgtctaaaacatcaaaagcaatggcaacaaaagccaaaattgacaaatgggatctaattaaactaaagagcttctgcacagcaaaagaaactatcatcagaatgaacaggcaacctacaaaatgggagaaaattttcgcaacctactcatctgacaaagggctaatatccagaatctacaatgaactcaaacaaatttacaagaaaaaaacaaacaaccccatcaaaaagtgggcaaaggatatgaacaggcacttctcaaaagaagacatttatgcagccaaaagacgcatgaaaaaatgctcatcatcactggccatcagagaaatgcaaatcaaaaccacaatgagataccatctcacaccagttagaatggcaatcattaaaaagtcaggaaagaacaggtgctggagaggatgtggagaaataggaacacttttacactgttggtgggactgtaaactagttcaaccattgtggaagtcactgtggcgattcctcagggatctagaactagaaataccatttgacccagccatcccattactgggtatatacccaaaggactgtaaatcatgctgctataaagacacatgcacacgtatgtttattgcggcactattcacaatagcaaagacttggaaccaacccaaatgtccaacagtgatagaccggattaagaaaatgtggcagatatacaccatggaatactatgcagccataaaaaatgatgagttcatgtcctttgtagggacatggatgaaattggaaatcattattctcagtaaactatcccaaggacaaaaaaccaaacacctcttgttctcactcatagatgggaattgaacaatgagaacacatggacacaggaaggggaacatcacactctggggactgttgtggggtgaggggagtggggagggatagcattaggagatatacctaatgctaaatgacgagttaatgggtgcagcacaccaacatggcacatgtatacatacgtaactaacctgcacattgtgcacatgtaccctaaaacttaaagtataataataaaaaataaataaataaaaataaaaataaagtgaaagttgtgtgactcttcctttcacttgaaaacttagaggttcctggagggttattaattgttttaatttcactattgttttgtctcagggaatagggaggccagaggagagggagtgagataaggaacagacagtttgtggagcagttagaacacacataacatttgttaagttgaccatcttgcgtgggagtgatttgtggtgccccaaagccattatggtagtaacatgaaagatcattgatcgcagattaccataacaaatataatgataaaaataatgtttgaaatattgttagaattgccaaaatgtgacacggagagatgaaggaagcacatgctgttggaaaaatgatgctgatagacttgctgaatgcagggttgccacaaagatttaataggtaaaaaatacagtatctttcaagtacaataaaatgaggtagcttctatgtccttgtatgtttcatgggactttctatgtgcaccattatgtcttctgtgaataaaggcagtttaacgtctttgacaatttttttgtatagcattgaaaaagtttattttgagttaaaaatgtgtccttgtaaatttcttttctttttttaaaaatttcttctaaaaaaacagggtacatgtgcagaacatgcaagttggttacataggtatacatgtgacatggtggtttgctgcacctattgaccagtcctctaagttcccttccctcaacaggccctgatgtgtgtcattcccctctctgtgtccatgtattctcattgttcaactcccacttacgtgtgagaacatgtggtgtctggttttctgttcctgttttagtttgctgaggatgatagcttccagcttcatccatgtacctgcagaagacattatctcattcctttttatggctgcaaagtattccatggtgtatgtgtgtcacatttcctttatccagtctgtcactgatgggcatatggactggttccatgtctttgctattgtaaatagtgctgcaataaacatatgtgtgcatgtgtctttatagtagaatgatttatatgcctatgtatatatacccagtaatgggattgctgagtcaaatggtatttctggttctagatcctagttatgccttaaacttttattttctgtctaattgctctagctagggcctctagttacaatgctggatagcagtgatgaggtcagataatatagtaattattaaaacttcccatataaagaattcttgatccagatagcttcattaattctctaaatatttaagaaaaaaagatactaatcttatgcaatttatttaagaaaataatggagaaaagaacacttcccagcttgttttatgaggctagcattacttgacatgaaaacctgacaaggacattattagaaaagaaatcatggaccaataatgttatgagcatagacataaaaattcgtaataaaacattagaaaattaaacccagtgatatgcataaagacaaatttaccagggaatgcaaggttagtttcatatttgaaaatcagtagtgcaagtcatcatatttaacagaataaaggagaaaaatcatataatcatctcaatagatgctgaaaagcgtttgaaaaaaaggtaactcctgttcatgattaaatctctcagcaaacttggaatagaagagatatttctcatttgataaaggaaatctataataaacctacagcaaacaacacatataatgatgaaacattaaaacatttctctgtggaatttgatcttacttgcttatactttcattaaatgcatatatgacattttgtaaaatctcagttgctattattgtattattatgacctacatttagttagatgaaaaacacttttctggtacccaacaatttgtcattgccgtttagataccatttaacagtttttctgttgcatctacaagctgggtccacaccagattgggagcacactccaaagcaggacttctctgtttagcttccccctttccatgtttaaaaactttcaactgtcagaaaaatacagggaaaaatgttgtatcatgaaaccaagtaatggttcttctattaactcaaatactaaagtatgactatttgattagggatgctagatgtgagaatggaaataaagggatacaagaggcatttaaaaatagatagttggccggacacagtggctcacgcctgtgatcccagcaccttgggaggccgaggcgggcagatcacgaggtcaggagatcgagaccatcctggctaacacggtgaaaccccgtctctactaaaaatacaaaaaattagcctggcatggtggcgggtggctgtagtcccagctacttgggaggctgaggcaggagaatggcgtgaacctgggaggcagagcttgcagtgagccaagatcgcgccaccacactccagcctgggtgacagagcaagagcttgcagtgagccaagatcgcgccaccacactccagcctgggtgacagagcaagactccatctcaaaaaaaaaaaaaaaaaagatagttctggaattctgagtgtacacagaagataaaggatggagataggatgaataaagaataggagattttgtacatgttattttcttttctgagattagtcttgcctcttgtctttgactagtcaattcctcctcatcttgtttttaatcaacttttttgagataatggtagattgacatgcagttgcaagaaataatacagagagatactctgtatcttttactcagtttgccccaacggtgatatcttgcaaaactataatacaatatcacaatcagaatattgacattgatacagtcatgataaatagcattttcatcactacaagaatccttcattttgtgcttttacagccatgatgacttccctcctgaccccattccctgcttagcccctggcaactactattcctataattatgtgatttcaagattgttatataaatgaaatgatgtagtataatatgtattgaaggtagatagagtgattcctcccacttcataattaattttttcaaatatatttagcaattctaatttttctcctcatatgaattttagaataatctatatatacaaaatattttgctgagatattttataggaattttgttaaacttgtaatgtcaattatgggagaatttacatgttttttatgtagtatcttcgaatccatgaacacaatatgtatcctcatttacttacatcttctttgatttttttttattatactttaagttttagggtacatgtgcacattgtgcaggttagttacatatgtatacatgtgccatgctggtgcactgcacccactaactcgtcatctagcattaggtatatctcccaatgctatccctcccccctccccccaccccacaasggtccccagagtgtgatattccccttcctgtgtccatgtgatctcattgttcaattcccacctatgagtgagaatatgcggtgtttgatcttctttgatttatttcatcagtgttttatagttttcagtatacaagttagaactattgttatatttattatacctaaatatttttattttttgagtgattataagtgttactgttttcaattttggtgttcacatatatattgctagtatatagaaacacaatttattttgtatgtttatcttgtatcttgcaaccttactgaactcacttattagttctatgcactttttttatagattctttgggcttttctaaacagaaaaacctgtcatctggaagtagggactgttttctttctttctttgcagtcagtctaccatttatttcgttttcttgtcttcttggactggctagaacttccagtactatattgaataaargcagtgagagcagaaatgcttgccttgtttctgagaatagtgaggaagcattcagtcttttatcatcatgtgtaatgttagctgtasgttttttgtagatactcttcatcaaactgaagttctcctctatgcctgtgtttctgagagtttttatcaggggtaagtattgaattttggcaaatactttttctatatcctgtgtagttttccaaacttggaaactcttctgcactctagctgccttcacatgggcaagtgttttcatatcattctgtgttcctctgtatgctttgccagaaaggagttcaccttaaattttaagacaatgttgtggatagagaaaagaaaaactttctgtgtcatggaaaagaggtcagaatttgggccaagattttactcctggctcttttatcaggccaggattttactcctggctccttctatcctttgcatagtgagatcatattctctttgagtctgtttcttcatttacaaatagaagaaaaatagctgcagtgatgatcaggtgacttgatagaggaaatgcttagtcaatgtaattggtttatagatagtaattaatgtgagagttttccccagatttttatagwcttcctttatcatttattgctttaccacaataagtcatttgtcaaggaggaacacgtatatttccctagagaacacaccgatwtgagaacatacgaagcctacactcctcattcaggaacaggcaagagacaagtgtacatctagttccaccaagaaaacacacacacacattaacataccagtaatagtaagaaagcttttatggagattctgaaacatctattagaccttgaaagataacttagtatttacatgggaggagacacacttcaacctaccacgttaaaaaagatcccctgagttgtatcctgagctgtcgtagataagtgtcttcacccctctgttactagcctgtgttcagtctagtaaaaagcctgcaatgagaaaggaacaatgacttctttggaaagagaaaagtgtatatgttttggggtgggattaagagaaacagagaaaccaaatgttcctatgggaagctggaacttactcagcattcacttgagaggaaggacaacaagcccctgtgcaaacccctaggaaatgtcagtagagtcaatttctgaaaaatagataaacagcttggtaaagtaagctaaagaataatagtgatacatcccagattttccaggatatttctgattgaaattgtccaattcatttttggtgatgttttaatttttgatttgggaaacacgaacactatacttctatgtttagctttagtgatttttctgccacaagcaatactctagactttagttgagtttttccctcttaattaaataattcttatttgaatatatttatgtttattttaaaaaaggctactgagtacgagattaccacttgttacgatcttgctccttggagcagaacgtgacatctcatatgtatatatacttagctctcttgggcaaaagcttctccctttgttccacatggtcatctgaacattccgtgaagcatttctatcctcccaggatgttttatttcttgttttcatgggtgaagagagactgttttataaaagttttcaaatacttactggatttgtatcctaaagggagaaagcagcaggtcattttttttttctttcaagggcttgctgtaagttggtcttcctcttaacacgaagaaaagaatgacattcttcatgaccgccattgtgagtaggctgtattacattaaagccccattattagcaggctgtgccttggctgattttatagagagctcaggaacagaagtgtagaacaaaaacactgatatttttcactggcacaaactgcagatactttacttgttgattaatttgttaaaatgtgtggcagaacatttagttatcaggtagtcattctgagtaaactagagtcctatgctcctttaacaatggaaaaattatattttcctttttctaatatcccagtgttgtatgtatgctcatttatgttcttggtttaacaggaacattgaacattccctcactttgaatctactctaactcctgtgtttgtgtattttcaccacagtaagccataatatataaaatagtacaattaagaaaaccttagccagcacggtggctcttgcctataatcccagtactttgggaggctgaggcaggtggatcacttgaggtcaggagttccagaccagctttcccaacatgcggaaaccccgtctctactaaaaatacaaaaatgagctgggcgtggtggcagttacctgtaatcccagctactcaggaggctaaggctggagaattgattgaacctggaggcggaggttgcagtgagccgagattgtgccattgtgccattacactccagcctgggtgacaagagcaaaactctttctcaaaaaaaaaaaaaaaaaaacttaagtaatcttcataagtaaatgatatatacttaaatacaaattatcacatttataaaagaaattttctgtatttgtccaacatcggtcaaattccttaatcttataacaattgacacaagaacaagaactgccacccagtccacatttatcttctctatcatatttaagatattgcagggctggagtatcttcttaggatatactttcatcacaacagataacctattacatcagagattcaaagaagtagaatgggagagagaaggagttatattttttttaccctaaatgatgtcatcaagtcactatgctaatggagattgctgcacttgagattatgtgccttacaaaataatttaataatgactttagacagctgatatttcccatatagaaaataagaattcagcttatttatattctggaaagaaccatatctgctgcttagagtgaagcagacctgcagtttacacaacagttgagaataatcttgtttaccaagctctttggataaatagaaaaatatccaccttatcttgagttgctgtggtaatcagctgaattagtttactacttaagctctctggaagatgattggtgcatcatctgtgaagatgactggaatgttagcccactgaagttataacttgtggaacactgttcaaattaccgaaaagagtaaatcaactatctgctggtactcagttctcagggagcagtttacaccttgaaaaatcagatccaacacatactaaccatagtttctcatgttatgatttctggtggaattcctttagactcagccttattcttcaagatactgaatttttgggaaccctaagtacagtttctccttcttacatagagacttgatgttcctaactggtcgcaaacttgggttcatcagaagaatctgctccccttgtgagcacaaataatatctcagtgaagagaaagacactgtcatagaagagtcaacatttatggaatttcctggaatccacagttatcttaaactctgttccactttctctggacaccagctaccttcaatagtgccaggttcagtgtctaaccatggagtatctcatagttggactgggtgagtgcagatgcagttgcatgagattttgaaacatcacattataaaaaaaaattttcaggtatgcaaaaggcaggagagaacatgtactccttaccctgctttaaaaatttctcaacattttgccaattttgtgtcatctattccccccaatcataacattttttgctgaaatattgtaaagcaaatccaaaacattatttcattttacctataaatacttcaataatttacatgggtttttaatggcttgctatttattttcagggtttcttttagtatctttgacctctgtcacagctcatcttgcaaggttgcctatctcattgtcagagagctctagctaaagctcattcatcgttttgtgaactatgaggccacatattctgtgttgacccaagttgggccagaaagacagttttcaagagggcatggcttctaggtctctgccgcagcttgtccactttctttcattgtcagctactagaactatggcagcccatgctgggatataatttttcattgggcacagaaaaagagggtggcgttaggcagaatcaaaagtaggagctaagaaaatgaaaaagacaaggcagaaaatatgccaaaggtgcatatttaagggataaggggaggaatctgtgatgttgaggatgagtccccttgaagtaggggtgcacacaagagtctcccaacttgtgaattactaaggacaccaatggtgaactaatttataatagttgtctcctgtgactgagaaggctgagagtggggattatcagtaagaaaatagctcagaggcaaccaagttgtatggatctttagaaagggaagcaaggaaatagacaaaggacaacttcactgaaaacatttatgaagtattcagtaatgttttaacttctttttaatgagaaacagcaaaccctaaggggaaacactctggggtgtttatgtccagggtcagcaaggctccagggttatgtcttattcagacatattcaggagtaccggggagagagaatactccaggaaataggtgttggcatctgtggaaaggagagaaagtcagactgtatcctagagtcttagggataaatatagagtggaaaacatgaaatcatcttgtgaacacagggcagctattgaggcttggcaggtaggttggggttattgtgaaaaagttcccagcaatccaaagagatgttttatctttgacattgtgccgcctgtgccttgagttagaaaggtacacacacgtgtgagttaagaaaaacttctgatactaaattatttatagttaaacctctagtaaaaccctgaattcaaaaatatttgtagcagaatacaaatattctttttgttttgtcatttatcctggtaaaagtcaagttgctgcagcgtgatggttctggtactgaaatggtcttaggaaagtggaggaggagtggagttacatgtttttaaaaacttgttttgtggctgcatagtattccatggtgtaggatgaagctggaaaccatcattctcagcaaactatcgcaaggacaaaaaaccaaacaccgcatgttctcactcataggtgggaattgaacaatgagaacacttggacacaggaaggggaacatcacacaccggggcctgttgtggggtgggggtaggggggagggatagcattaggagatatacctaatgtaaatgacgagttaatgggtgcagcacaccaacatggtgcatgtatacatatgtaacaaacctacacgttgtgcacatgtaccctagaacttaaagtataataaacatatatatatatatatatatatatatacatatataaacttgttttgtgaattttgaaatagttttacacatacataggcattgcgataatgctacggacagttcccacagtccctgttacctagtgtccatcatggaaagcatataacgtaatcatagcacaattatcaaaaccaggaaatcaacattggtaaatgctattaactaaaccatagatcttttccagatttcagtagttcttacatgcaatcattttcctttatagcatatggttcactgaaactttatcacatgtatagatttgtgtaaccaccactacaatcagaatggagatctcttcaatcatcccaaaggaactctttggtgcagtccctttgtaatcttgtcctttccccaacctaatgcctggcagccactaatctccatcattaaaaatttgtcatttcaagaatgttatatgaatagaataataactatgcaaccttttgagattgactttttttcccattcagcgtaacacctgagatttatctaagttgtgtgtttcagttgctgagtaagattctattttatggatgtaacacagattgtgtatccattcatgtgtgttgaagggcatttgggtttttttcccccaatttggggctattactgaaattatattttactgttttttcctaaatatatgaatctgaaagtgtatctgtatcatttaagacttaactccatgtggaattaatttctagaagcgtgaagaacaggttaccagttctcccaggattgctatgatgactaatttttagctgaataaaatatgaatatatctattcatttttatatgtgtcaagaatgtgctgagagttataggaaaacagaaaggtaataattgttaccaaatcatgaggagtgcccaagttctaaaaaacccacaaagtcaaagaatggtgcatggctatagtttcagaattattttctcagagagtgccagagccaatcttcttggtacctgagggtaaacacccaacctcttgttcctcacttagactttcttctatacttggcttttctccatgaagggtactgtttcagcacattggacagaaaaatacaagcacagtgcaaaaataggtgtgaatgttgtactgattcaggtaccagtatgtgttttgaaagttaactctgcttttctagtgatacttactttggataaaacctaggtcaagcctgttcaaaactgttacccgaaggcaattattcaacattataagcacatggtttccagatcattcatcattttatttaacttcttgagtacataaagtttttatcccatttgtgagtcttgatgcacacaattgactaactgtgtttgggttattttctcttccacattgggaaaaactatctttcatgatctatctcccttttcaaagctgttaaacttttgtcttctttaaatgattttctgtgatgatccagtgtttcttgtcacgtttctgtacctatatgtgctactgttgtgtatttgtttgttcatcctgcctctcccacggaaagacctgtcttctgttcttcgtcaccaagactctctacacagtaagggctccatctgttttgactgttgacctactgaagggacatgcctttgcggacagattcaacacaaggttgaggattaaacccaggcttattttccttcggattttctcaacaatccttccatctcctagtagtatctattctcttctagcaactttttttttaaataataaaattgccttggtcttctaggaccctctgggaaggtaggtgtcaggatggaaagtaggttggtctgatcaagggagtcctgtcatgggaggtgagaagacctgggatctggtactggatttgcttctcactcctaacatgatcatgaaaatattttctgcttccttccttattagcaaaatcaggtagatataaaaggctctgaagcagactgggttgttgtaatggcaaagggggaacytaaaaaattctggactgagatgtgggagtcacaccattgtccactgcagacataccaaacaagccaccttaatttagagcacaggcttgtgagtctagtgatgctgttcaatcatacattttaatctctataaaatgtaatctcctatgcacaaaggtagtaccaatagcacttgagtgcctcgaagagagttttgcccaaaaagcagcagacttactgtatgatatgtccatctgtgaaggtcctggctcagactgagctgacagtatggaagtctactctaatgcagaaaggttggaaacctgtaattattgttaaaagtttagggttgtggaacctatttttatagcaagacaaacttgctctggtattggcccatggatgggtaaaagaaagtaaatgctttcaccttttaaaaaggggaaagtgtggcactgtcagcatggctcagtgctcactgtcatcctgctgctacatcatgtgcttgatgcactgtcatttgggtgataacatcacatttaagtcatgatcatttattcccagtgtcagagtgaaggagtcctgttcatttgagtttcagtattcctcaaactggatttcaaaaagaatttcttccaaaagaattcatcaaggactaccgtaatttcataccaggaagaaaactgtcaaaatatgtcatgagtccaactaaaaacctagctcaaaccatcatagtctctcatccaaactactaaattgacttcctaactaggttcctgcattgactcttgctcctccatagtcggtgctccacacaacagccagagggatcttttaaaattaaaattctgttgaaaatataatacccatcacaaagcctttggcagttttctcttagaagtgcatgcttttacttagcttcaagcaatagtatcttctacctgtaggtcttctctctccatatataagtccttcctatcttttcaaatccagattttacattcgaatatccttcaggagatgtttaatgatccccccagctgataaaagttaccttctctgagttttttatgacacagtatttgtatattttatgccatgtatcagttttctaccttgtatcatagtaatttacgtaccttcatcctttctctactttgaatttattgaggacagattctgtgttttacaaatctgcattgggtactcaataaatatttgtgaaataactaaataaatgagctgtgttaaaattaaaaaaaaaaagaaaaagaagtgcatgcaataaaaatggcttgctatggctcacaggaaccaagtgtgatctggcctgagtcagtcttttcaacttcccctcctgccactctcccctttgctggctttcctccaagtacactggggtttttacttttctttggatcttcctcagggcctttgcacttgtggttgcctctactgggcacttcatattcccccagatttttgcctgactcccctacttcatttatgatcaacatgtaatcactccctcattctttccttattctctatcccttaccatgctttatttttcttcatgacccttatatatcttagatcataatatatatttatttgttggcttatttcctgccttcctgtctagagtgtaaccttcttgagagcagtgacattgtctttttcatactgcatcccatgcctgtagtgtctggcacagaacaggtttttgattaatagtctttgaatgggtgaaagagaatagaggtatctggcatagtcgggggtcaagtcagcctgaggtcaaatccaaatcttgtagattcgggatattaatcatttgttagatacatagtttgcaaatattttctccaattctgtaggttgtctcctcactctattgattatttctgttgctttgcagaagctttttatttaaattaagtcccagttgtctgcaaggaacttagacaagaacaacaacaaaaaacaatcccattaaaagggggctttaaagtacacgaacagacatttctcaaaagaagatatgcaagttgtcaacaaacatgaaaaaatgcacaccatcagtaatcagagacatgcaaattaaaaccacaatgcaataccattttataccagtcagaatagttattattaaaaagtcacacacacaaaaaaacccaacagatgttgatgaggatgcagaaaaaacagaaccattatacattgttggtgggaaggtaaattagtacaacccctatggaaaacagtgtggagatttctcaaagagccaaaaatagaactactattcaatccagtaatcccaccaccagatatctacacaaaagaaaacaaatcattttattaaaaaagagatacctgtactcatatatttatcacagtactattcacaatagcaaagtcatggcatcagcacctaagtgtccatcatggaggactggataaggaaagtgtggcatatataccacagaatacaactcaaccgcaaaacagaatgaaatcatgtcttttgcatcaacaggtatgaacctggaggccattatcctaagtgaaagaactcagaaacagaaagtcaagtatcacgttctcacttatgagtgagagataaacaatgggtgtacatagacaagatggaaataatgcactctgaggaccccaaaagcacagaggatgggaggggtttgaggtttgaaaaattacatagtatgtacagtgttcgctattcaggcaatggtcacactaaaagcccagactcaccactacacagtatatcaatggaacaaaactgtacttgtacctcttaaatatattttaaaaatccatactttggccgggtgcggtggctcacgcctgtaatcccagcacggaggccaaggcaggcggatcatgatgtcaggagatcgacaccatcctggctaacatggtgaaaccccgtctctactaaaaatacaaaaaattagctgggcatgatggtgggtgcctgtagtcccagctactcgggaggctgaggcaggagaatggtgtgaacccaggaggtggagcttgcagtgagccgagatcatgccaccacactccagcctgggcgacagagcaagactccgtctcaaaaaaaaaaaaaaaaaaaaaaaaaaaattcatactttactagtgggcgattattggaatatgaagcatttcagtttaactttgtaagctttagtctttgtgttttaaaatgtgtctgatgctgtcttcttcatagtttgttaggagcactaaatgaatagtagaaagcctgccagaaagtgatttagtctgaatctataaagctgtttctgagcactgactgtaaagtgcactagaagctcaaatttttaggttttgtcattttgtgacaggttgatgtggaactcgaggggttggccaaagccctcagagggttgtaggccatgaaagttcgagaaccactgggccatgtccatgcaaaatgaaaaatagttaaattgaaaaacagatgtccttgtgcctcctaattcccagcaggggctcttgtctgaagcctgagatggctccttgggtttctgtgaatgttgtcaagggcgccaaggatgccggacttgcatttagatgcccaagcctctgtgctggaaatgatgggaaaaaataggaactcttgaacttgagcaagtattagaatatgtgaggtaatggagaagcctcctccctcatgcccatgctcttgtcaggcctgtttgttaaggtccaggccccacttcccactttttttatattattattatactttaagttttagggtacatgtgcacaacgagcaggtttgttacatatgtatacatgtgccatgttggtgtgctgcacccgttaacttgtcatttagcattaggtatatctcctaatgctattcctccccctccccctaccccacaacagtccctggtgtgtgatgttccccttcctgtgtccatgtgctctcattgttcaattcccacctatgagtgggaacatgcggtgtttggttttttgtccttgcgatagtttgctgagaatgatggtttccagcttcatccatgtccctacaaaggacatgaactcatcattttttatggctgcatagtaacagcaggttctggagaggatgtggagaaataggaacacttttacactgttggtggggctgtaaactagttcaaccattgtggaagtcggtgtggcaattcytcagggatctagaactagaaatacacgtatgtttattgtggcactattcacaatagcgaagacttggaacccacttcccacttttgtttcctttaattgcccttatgagaccacatccaaaatcccaagtcctgccaagtgaatgcagtacttaaagatttgactactggatgtctggtcttggagaaaacagtcaagagctggagcaagacagagagcagcatacctgtaatacagcttattaaaataatgcaaacacttctgtaatatgtatgaggtgccaggtagtctgccaagaacttttcatctattaatttgtttagtctttacaactgttcactccacttcctgttagggagatagctgttgttggacccaatgtagagatgaggaaacactgaggaccagagagtaggcatccaaggtcacagagttgggcatgcgtggggcagagccccaggctcaggcattctggatcccaggcccatgtgcctgcatggtagagggggagctggcactagcccttgtgcccccaaatatcctggctgcattgttcccctgttcttagttcatttgtgttactataaaggaatacctgaagctgggtaatttataaagaaaagaggtttatttggcttggaggtctgcaggctatacaagaagcgtggcgccacatcatctgcttctgatgagggccttaggaagcttccacccatggcagaaggaaaaaggaacagatattacatggtgaaacaggaaggaagacagagcgggggagatgccaggctctttttaacagccaggttggcagggggtgtgtggggagactcttgtgggaactaatagagtgaaaactcagtcattaccttgaggatagcaccaagccattcatgagggatccacccctatgacccagatacattccaccaggccccacctctaacattggagattaaatttcaacataaggtatggaggggacaaatatccaaactctattatccccataaatggttaaactccgggagagacaactatgcacctctcaatcccaaggtgagttgggattcacgattggttaaaacttcatcagaaccatccacattggaaatcacatctaaaacttgagtaattttatggtttacaaagcatattgacttccttgatttattcatgttgccagctgccctccgaggcagaggatcttttcacttttctcctattactcaatgccactactgagcctctgcactgaccctacggcttcctgtcgtactctctgcaatgctacatgtcccttctagtctagggcgatcctggtggaagcatgaagccagccagcctctctctggtcaccaccatcacttcattccttatatataccaggcatgggaatgtttcttttgcttgttaatttttgttcttgctcttatctgcatttatcttccttcccccaagtgtactgccagaccctggagaacagggaggggaattgtttttcctttattattctttcctcagttcctgctgtagaactgtacatctagtcaatgcttaataaatgctggtaagttgaattatcaacactgaacgtagaaatgcactgttgcctggcttgttagttttgtaagaatagggataataatagtagcaactaatgtgtacagatttgactatgtgacattatttaagggctttgcacacattaatccatttaatcctctccatgacctaaagcactgctatgctgaagtgcattttgcctatggagaaatgactggtttttgggaagccaatgtgcagaaggccttgtttcactacccctaaaacagtgcatgtgcaggaggactgttattgctgtgctttggaaggtctgtggatgaggaaatgtagaattgcagatttatgggttggaagttgatttagaagacacatgtaacagaagtaacaatcttatcagacttaccagtgtcttccacttatttccttwacttcagatgctcaggaacgacagcacytgcagaatgcatccactgctgaaaaatgagagctgtttcttgttggtactcttcagggacattttagcatagtggtggactccagtgttgacttttcttttcatcatctgtttgatcttggtggattcttaagaatctctggacctgagtttgttcatctgttgattggggttcatggtagccacttctcaaggttatgattgaggtgaaatgagatgctatgtgtgcaaaggacctggtagcaagaatgacatgggaaggagggcttgctcaataaacattgcctgttatagtgtgctggcattaccttaaaatccttaataagctgtaagttttggatgagagtcagaagtgttgggttggtgaagcattttgctacagattgcaggcttttctccggtgtcacaaggcattgaaaacgcttgttcggagacagcccagaagggaaaaaaaaaaaaaattctggaaagcctggcattttgtgctatgttgtgagtaagacatttatagttattgagccaaaatttccactgtaatagaaaaagcagttgcttttaaacttctggtccaatttagtaattatgggtgagttaaaatgtaggccatttgaattggatttggaggatcaagtaagattctgtcctacagtggggatgactcatagaggaggtagcttgacatagtggaaatagaagctgataaggagccaggagacccaagttcctgtcctggatttgcacaaataaactgtaatagcctttaggcaaattattaaacatctcagttttctattatataaaatgagagggctgtgtttgtgaatggatctttcaacatgcttaaggttataccaaacagatcactgaaaatgaaatatgttatctacagtcattagggaataaagtattcttgctagtgcaatatacttatttggagaggattacaacataaacaagaaccaacgagaatacatcagtgccagaatgatacagacataagcagacacctgaggctctctgatacccgcaggtcattgctatgtcctaggaaaacatagccatgctagttataagagttttctgatgatgagtctttataaacagaggatttactgggaactagagatggaatttttaaatgatttccatgttatggatgacctgtacttgggcttatgatagctctgccacatcttgagaaataatttattgactaaactcgagttggcaaatgtaaaaactcatttgggttagctagcttgtttacttgttcttggcattctttcttcttcttatttcagttgtaggcatgaagccacattttgggctgatcatctttataataggcttatggttttataacatcagattttgaatgatagcattttctgctctctgtgtttcctatcacctgtagaattaagataggtcaaatatggaacagatggattgaatgattccctagaattattcactgacattataagggtgcctcctgtggcacaaatagaaatatttctgagagttgtaaaaattaaatttttaaaaatcgaatccaatttttctattgacctgcgttagaatttctgagacattctatcttcatttctgattgattttcaattagcaaaggttcctgccattttaactttaaatttcttagttcccctttttcctccaagtggttaatgatctgtgaacaaatattggagcaaatcagagatgcttcagtgtacagtcaccctatagatatttctggtgtgcaagggagtgagctacctgggagatgaggaaccttggttctagtgttttctctgccaccacagaggtatgcatctttgaataaggtctttttgcctgtttcaggcaccattctctcatttgtaaattatgagctccattgatcctatctggcttcaatattctaccgacaattgagtgggaaaaggaaactttctctgaatcataatctctcaacttttcttttcataaattttcttaaagtggattatacctatctgtaagtggataacagcctccatttattatccttatttttatttggctttttttttgacttgcaaattcctttttggatggattagattgaaaatctttgggaggctcaatcagcccagacagatttattcattctttattctggatgaagaagaggaaatagtttaagatagatctgacatggaacattaatttgattgaagcctttctgtgtgaggagtaattgtagcatcttcattgtcataatggagagattagcatggattagattagcttgtgtacaaaggttgtacaaattgattgctgtgatttgtaggctgggctgatctttatagtcactggcatgacttcttaagcattatagtcatgatttctttcatgtggtttacatgtggcaacaagaaaagcacatttccctcgttaccaaaaccttgtgtctcccaatgggaacttgacatagactcaaaaacataagacgtgtacatataatattaaggagatggcactggtcatctggcctgctgtctgggatgacagcacacattggccaaagacagaagagttcccaaaacagatgttcagagaagatggctagaatactgttgaaatgtggtctagaataattatgaacataagcctaaaaaggtagccaagatatggctctgaattatagccagtcatgggattattatttaactccagtttagtatgtttcctgccaagtatgtgccagaccctctgaaacagaatctggtttttgccagcagtgcttagcaactctatattttaagtctaaattccaaaaaaaaaaggaagagtaaagaatactaaactgctttctgatgggagtaagttgtatttcaagtggcctcagaaatctttttctctagaggagactttctgtggctaagaggaagagagtgggcacttctcccctccactgaacccacctggacttggtctctctcccaaggctttcactgcaattgaaaggctttttcactgccctaggtctctctcctaaggctttcactgcaattggtacatgtgttcagtgactattagaacttaaatgatcactctcatcccacctcactgatctcattttccaaatttctccctcttgctctcccattctagggaatctggccttcttcttggtcttcagatgcactgaacatcttcctgcttgaggatgtttgctgccttaccttactctgctggaaagcaattccttccaatggtgcaggtctcacttccttacttccttcagattttcgctcagataccatgttattcatgaggcttccctggccaccccatttaaaagcagcaccccaccagcattgcctatcacccccaccctgctctgtattacctgataacactaatgaccgtctggcagattatatctttatttgcatatttattatctgtattctgtctttagaatgaagayagaggctttattccagtgactgaaacaatgcctgacatgtaatggaactcaataaataattgttgaaataatgaatgaataaatgattagcctttaatttgtattcattcgtacacattacattggggttttctagaagacagtatgaaaatttcacttaatttgtgactcaagtacagaaagaacgatagagatcagaggttcttaaacaactatccatgaacccaacgctgtgctttacaaaatttaacgtgcatgtgaatcgacagaggatctcgttaaaatgtgaactgtgatttagtagtctaaattggggtctcgggttctgtgtgtccgacaggctcacatacgatgcggatgttgctggttctaagattgcactttgaggagaaagactctaaagtacctgtggaagggattcaaggggttcacaaagccagggttatgaatgtccagtatcattgttatagcaaagaactgaagtgctagtttctagaaatttctggtttatgcaataccaatgaacagatcatttattggacattcattgcagagctttcaactgttaactatgcatggttgttctgtatgcagacataaatataggtataggagaatttctttttctgaggaaataatagaaaatattcatcagtttgtcaaaaggatcagtccaaacaatggtgacagccattgttaatggatgatggcattaaacaaaagaaactttaggtatcaaaccaaaacacatcataaccacatcgtaaaagtagtgacaaaaccaacacatatgtttgcaaataccttgggaagattgtgttttatagcaatagtttttttgctaaacaaacaactaacttttaaagttaacatttgctggagatgatattttcccagggaagtatttaaatgcttggaacacacctatccaaagacaaatatttgttttcccccagccactggaaagagaccccaactggaaacattgtctagaaatgaatatttggaaactctgaggccctctataaatgccattgcagtagctcactgtccttctaagctgaggccaaaatgccctcaaaggggccttggtgtagaaaagctgttttcaggcaaaaaaaaaaaaaaacaaaaaacacaacagcccatcaagagctgcatagcttttcagtcaggaaacttacccccaggtggatgtttctcagccaaggagtgtgggcaatttagtttcaaaagtaatttggaacaactgagatgttttatattaaatggtcctactaaatagacatctagcacagggcttagccaaattctagaaggcctcgcatggtatggtatcacgatcctcataattgctaaaaatattactcataatcataatggctaacaattattgagtctaaatatatgctaggcaaggtgctactaaccttccatacattttcttatacaatatttataaaactaattcggatggtactataagtttttttgttttgcagaaaaggaaactaatgcatggatatgtgatttatattgctcaaggtgacaaaattgttgagttgtagaattgggactcaaattcagatatgctgattccggggctcatcctgctaatgactgtgctgtactcataatcataacaaattgatttttggtgaccttgaaaccctgcttaggaaactaaattttaagattttggttgaatttaccctcagggtggagaaaacacaggttttcataaacttactgtcatcaaattaactatcctatattatttttcagaataaacactcactacttgttaaggaaatcatggtgaaacttattcatatgagctaagagcttctgcattcccatttcatggaaacgtggattttccacgtgtggctctgtagcatggcaaaatagcttggtgtgcaaaaataccctagggtaaagataaatgtaattgtttttgaaatcaaccacttgtccctaatgctcaatctgtgcttctgagaatttgccgagtttcaatgctttaatgtgtgtattgaacagggctttctgttgcaaatagcagaatttgcacacgctagttgaatcagaaaacaataacgtaacaacagatactaataaacacgtagaatctcrgagagtgccaaagagcagggttctggggctacacagccacaccttaggacttctctctaatcatatgacttctcagcacctgtgatgccaggacttggcctcccaaagctgaggaaccaaatgcctcaccaactgctcctgccagaaaactggttctccctggtttggtgcccatactctttgaattttctggctttaaaaattggactcatggtgtgagaaaattccaaaatgtaggaagatcttcaaagatgttgagcagtcaccacgaggaagcttccaatgttgtgtatttcagatcagtgttgtggagtatctttccctttatcacacttttccttcatttttactccctttgattgctaaatctttacagagagcagggactctgttcattcagtccccagaatggcaatgtgttaagtccacaagaaggcttttcgtggacttttggagtctgatcataaaggagaaatatgtcttaaaaaggcagtggaggtgatgtggtgaattttgtgcttagcatttttaacttgagaaaaatgataagacaggccagtcaacacacaatgggcaaatggagataggtgactgtaattcagaagtgcacacaggactccaggtttgagtatgggagttgtccttcaaggattggcagttgaagcattcaccagagcatggatgtgttttctgagcaagagctgtcaataattaggatagaaaactgaacgtggaaccctgaagacctctcaccctgtgccaaagtccaggtgcagaaaagaaaggtgagcttgtgataaagagcaggcagagttcagaagacagccatattattttggtgtcataggggttaaaggaggcaattcatgagaattgattgcttttttctcactctttattgagatatagcttctcaaatgtaaagcatgatttgaaagagatcagtaacaacagttatgcattacatttgaggtgtgttttgtacttttcaaatttgttttcaaatccccatcacttcatttaacttcattcagacacttaaattgaaaattactttctatgtgtggttaaaaaaatcttgcattatttttgtttttttctttaatctaacttaaacatggaagaaaattcagttgtgtgtagttaatcacaggtttgaagaaattaccttaattctattttgagaaagaaagagtatcatgtggtatacagagtgaaggcttggatacctccgttgcacaagtttcctgcttagctgggacctggtcaggccacttcacctcccatttaaaacatcctttagaactaggtatggagctaatgttttagatatgaaaaataattattcacagcgtgttactataaaacatatgttcatagattcttacatttgtatacaaaacaagaaatcacaaagctttattcatgcagaaaaaattaatttgaaaaagcccactgtatgccaagaaatattcttgatgcttggaggtttggggttgaggtagcaatggggagataaaatgaatatggcttgcttcttgctttctgcaaagaattgagtttcgattctgacttaagagacataaacaaggaaaagtacattctccatgctgcatatgtgtggcttaggccctggcttgatgaagggagatttggtattttgttaatgtaggaaaaactaaaccaaagtgtcttttctattctctcatttaacagtagtcaacacagaagacttctgtgacctctagtcaccaagaagtgtgtggggatttctcactaccaacaaataaaccatcagttctgcagctgacactagctgggtgtcctctaattcaatgctactctgacactgtctacctggagatacagtcagatccctcagcttgagagctcagtccctaagactgtttcctcccctcactgcagatgccagtcacaagctccagtttgttgcgtctgtgcttccagccagctggctataaattggggttccctcaacttcccccttgggtttgattaagttggtagagtgattcacataactcaggaaaacacttacttacatttaccatttaccagtttattatacagaatattgtaaagaatacagatgaagaaatgtgtaaggtaaggcatgggtggtgggggacagagcttctatgcccttcctgggtgggccgtcctccaggaaactctgtatattctgttacccagaagctctctgaacccaatccttttgggtttttacagaggcttcattatataggtgtgattgattaaaccatcggaccctggtaatcaacttaactttcagcctctctccatccccagaggttgtggggtgaggttgaaagttccaaacctctaatcatgatttggtctatccagtgaccagcccccatcctgaagctacccaagactggcagccagcagtcaactcattggcatacaaaatacatagtttggaggctccactgattttcagtgtggtaccccaggaaagtggatgaagaccaaacatgtatttcatgaagccttctatttcagtagtaagaaaaatactaaattataatacgaatttttttataccagcaaagcagttgcatttgcatctttaaaatgcaagtgcaacttctttttagagatctattgcattttaaagatgcatttcatcacttattacagccaaatgacttgcccaggcattagattttctgttgcagtgatagcagggatttaaataatgattatcttctctttgacctggtgaatttcttattaccctgcatatagacatggttggattgtactgactttgcaaataccacacaactgaagttggatttctgttgtccttcaatcaaccatctacctaagcctcaaaccgttttgttttgcttaaaaacagaatgagtttggcaaacctagaaaagtacacaaaggatcatccatggatataggatggaagatgtatgaatatggaccaacaacagtgtttattttaataattctaatattgttataagttgtcataagcttaytttcgtaattagagaatagtcttcaatttacactgaatgcatgtttggcaaatatactaatgttatatatgtacttctcttgttcagggcagtcacttgttttaagtaacatgtttatctttattaaaatatgaatttcatgcggttttacagcaaggttattggttaaatcaatattctcaattaatgaaactagtgacatcatcatcaagagcaatagctagcatttgttgaatcctgactatgtgtcaggcattattttaatcacttcatatattttaactcatttaatcttcacaatggctctactatatagaaacatgtattaacccaattttgccagagggttgagacacagagattttagggaacttaggcaaagttacatagctagaaattacagtcagtgattgcaaagcttgtgctcttaacttctattttatcttgtatctgtaaagatatttactaaccaagttaagtgtccttagagcatatttttatagtataaaaattgggaaaaaattaagataaagaaaaaaacccataatcctactgctgaatgagagctctgttaacattttgaggtacacatatttaggctttttccctcctttacatacattcacataatttgtattataaatgctcttttaaattaattttattcaattaatatattttaaaactttccccatggtattatttcattattattttaaatggctacattaagatatggatatttaggcttgaaataagtttaaacaaacctattgtcttcttaaatctccagtcatatttccatgaaggatggcagctcttagaagtcatggaagcaaagaacagtacccctcaggaccattgtaagaaaatgtcttctttgagagttcttaagactattagcacatctgaggacattttcctaaggattcatcttggtgtaaggacacactggggatattttaatttgtagtgatttgttgttgttgagcaataaacagtatatacctcttgaatttgctaaggaatgtgtgagcatacagtgctggtaacactacattagttaactctctttacctttcaaaactgatttaatgaaggtattttaatgccgtttcatagataagaaaatgaagtgcaaagtagttaacttgactaacaacaagtaagtgaaggagacataatttaagctttagcacagacaatctgtctcttatagtgaggcagtataacaataaatatgtggaggagatttctaaaatttccagtgtatgttaagaaaacaatgtattttatgatgttttagagaactgcccattataaccaactgataatgaaattcttcatctttccatgctatcatatttttcccttgtcagcacactgacctaggaatcaagaaattttggttctaatactcgcatttccacctttctgggtctcaagtttttatctttaacataaaaggttagaaaacttgaaaatcttaaagtctcttcttggttcagagagattagctttatggagttgtagagcctgtgtagaagctttataaagtggtttagagtcaattgacctcattggagaaaaaaagtagtcagtaagttcttcacctctgcaaagtgcagactgaatgtggagaacagaattgttgttttcttagctgtggctgtagcaggctgttactgattaccctcataagatgttttgaatttgtcttggaggaggtggctttcagcctgactttcaggctggctttgggtcatcctgagtaagaacaagactggtagtatatgctgccaaatgtaaaattatataactgcccaggagagctgtcacacgtggaggatactagaggctgccatgacaatattagccaaaaaatgataaaccacaacgtgatagaaggaagaatcctcactttatagttgagccccgagtaagtgaggaaagttgtgcaagtttgtaacttcagtgtgatggttgaggatggaattaaagtctcctgactgcttatgaaacctcccacctatatgtktttacgcaaaatgtcatggcccttacatccttttgtttccattgctatgatggttctggattgtaatcctataagaatatgatcacttaatgaatttatgttcattatatttcatatgcagcctgaaatgcctctggtttctttattagcaaatcaacagaaaacacttgataaccagattcaagattagacagcaaagatctacagaaacagattaatatcattttatggcatactatgatctttttttagggaattaactaattactgctcaaggaagcatatccaataatatgcgggtaaaaggatataagcaaaaaggtagcagtaaatagctgtgttttggattccacaaggcttgtgttaggtgaggtcttattcagcatagttatgatgtggtaaagagagtacattgcccactaatacacatttcaggcattataaattgggaaacttgcaaatgcaaataagaaaggatgggtaaaatcaatatgcttagtgaagaagggatcttaagaaatttttttagaaaggatatgggaccctaaaactattgaagtaacaagaaattaggacaagaaactaatatgggaccctaaaactattgaagtaacaagaaattaggacaagaaactaacagtgatagaggaagggtactggcttgttagatttgggctcaccgtttggcaatccatctctaaacccyatcacaacttatttataataataatcttggtgctgatcatcataatctgggtatgcagatttacctacataattttaggcaaattggttaacccctctggacatttaattcctcatctgtgaaggagttacacaagaatacatttattggtttaaataactactgttcaatagagaatttttaaattagcatctgtagctctgttaggagggaaaaatgatgatgttttatgatttcaacacatgacttcatttctttgagctatgtgacagtcatgctttcctccattattcatcaatactccccactgcttaaagttgcaaatatctagggctgggctacacaaagggaactgagagatagcccacccttccgtgcaaattttattgataagagtgatgtggtccagagacatgagacaccttgtccaggggtggttaatggtggagcctgaaggatgagcaggtcatgattctcagcacagaactctttttctcttgtagaaaagatagcaaataggctggatgaggtggctcacacctgtaatcccagcactttgggaggctgaggtgggcggatcacttgaggtcaggagttgagaccagcctggccaacatggtgaaaccctgtccctactataatagaaaaattagccaggcatggtggcatgtgcctgtagtcccagctaccgggaaggctgaggcgcaagaatccattgagcctgggaggtggaggttgcagtgagctgagatcacatcactgcactccagctgggtgggagagtgaaactgtgccaaaaaaaaaaaaaaagaaagaaaaaaagaagagatagtgagatagtaaataggttttcctcctcatgccaactcagatcagttgatagtacctgccagttgagaaaatttgtaaggacgtagtacctaggtactacataaaacactattgctattaataaataattatcactatcagtaattattcattagtactgtctgctatattaacaccatagggaaatagaaaatgtttgccacctcctatcaagaatattctttaaacatattccttcaagataaacgttcaatatttattctgcctttcttgtatctctgtcactcacaatattacctaatgctatctaatgtattctgttcttagagaagtaaaatgtctcagtagaccaaacttagatttgatcattacgaaagatgtcattctcagtggctggatcttcatgaggttttcttgagctgtttttcatttcacctgctgctggatgttttaggctgctgtattcrcatctggtggcctgtctcactaggatctcatggctgcccgggcagtgtcacagctctgagttcaggttggctctagtcttgcccttcgctacagaatcgtggaatacagtgggagatgaagaaggcagcactcttgccctttgtgtttctagtaacttaaattcaactcctggcagcctacttcacattctgatttgggcttctgatgttgagtgctgagggaagctttctcccactgcttacatgttctagctccttggttggctccaaggagttgtgatggaatttcttggcatacttcaagccagcagcagccaggttggccttttccctccacatcttatagctttgtaggattttgggagaaaactgacctggaactagttacatgacctttttcatttatttgggtcttagtgctcatccttgtcacctcttattatttagaatgaaaagcacattactctttaaggaactagagtataaattcagaaacctagaacacatatattaatacacagaactttttctcttttcctagctgttcaaatgtaatacagttttatgttcaaactaaatgaatgcctatttattcctggaagtaaattttgttattttctagtccaggctctttgttttacacatgacaaaatagaagcccagtacacaggagggttgaatgacttgtttaatggcacatggccaaagaaacagaacagaaaaaaagaaatcagaatttgtcagttttctgtctagtgcattccaaatcacatgacacaaccattattggttttagaattggaaaagtttggtttattttttaactgactactcagattttaaaaaaattgtttcattaatagattagtaaaaatttaatactgctgttcattgtagggcttagtaagccattactatgatagatctttatttttgttttctttaagtctgtactggacattgaagtctctctatggtctctggacttacgtcttggccttacagactgtcctgtttcacctttgcctcagtctttgcagtaatctccctcactgagaagtctggaacatgccacatgttcacagtgaggctgttaaaacttccagccccatccaaaacctagacttggaaaccattgtcgcattgctttctgagtccacagatagcaaatgtgacaagtcaaaaatgatgcctaatgttgagcaaggagtctttaaaaagccctactcatgtttctaattctcacacccatgtaattcacaggcatctgtccacaggtagtttgagaacctaactatattaaatttcaatattcagcaaatagctcataaccaatcatatctgaattagaaaagcatgtgtaaagaacaatagcaccaactagcactcatagcagattattccagctatgttataataaggcccttggcaataactcaaggtckgttttttcaaaatgtaaggattaggtgttcttgaggcaggaaagaaaaacaagactattctttgcagatggagaaaaaaatgaagtagattcactagcagagtcactttcatggaaatttggagctctgctgcacagttttagtgtttaaacaggattggaagtcctttgggatgacattttcaatgctgaaagagaaacacctgatagaattgagtctcaatgaaacagaaaacctgctgaattgaaaaggggcttcactcagtgactaattttctaaagtgagtaccccaaactgttaataactattttaaagcagttggatgactacattcaagataaaaaattatatgggaataaaaattgtcaatatatctgattttggtaaaactaagcacacaatttaaatttatcttggaaaaccttagtagttattggaattacttgagaatctattgcaagcaatctaaatgaattcttccaaaacatgtcactggagcaggtactcaagaagtaatctgaagtaaacaaacaaaaacaaagctatatttatccttcctcttttctgtgtaatayaatccatgggaagacaagaagaaatttattttctacttgtgagatttggggatgatgatgctttttctatccttatcaccatttgtcaagatacaactttcattactttccagtaccacctttgaacagcatcttcttttttagtatattctcccttcctccttccatctctccattctttcttccctcctcttttcttcccatatttccttccttccttctttctttcattttctctctctttggaatctcttctcttaactttatgttttccccaagtgatcagctgtttttatacttctctgctggttcctcctaacagagtctttgcagattttaaagtaaaaccataaagaagaaaacataaatagaatcttcagtgatttcacagcagaaaggcatggtttgtattactttctctcagaggtatttttaatggggtaaatatttatttccagatgacccaaatctctttgttatgtttgctgacagaaacagcagctcctccttctttctctctacagtaatgagattatggacagggatagaccttcttcatactgctctgacaacagacattttataaaccagggacgggctatttcaattcagtttaattcaaaaaaataattattggatacttaccacatctaggatattgttagctgttataaatgatacaaagataattaaaacattgttcttcctctcaaggaatttgtaatctagtatgagggaaactgtgtaaataaatatccaatcctggatgactgccacaacataaaaacacacaaatgtttaggaactcggtagacaagcaaaggaagtagaatagtaaagatgaatgtctcctatttgtcaatattttacttcacctctgtgttgttttgggatatatcaaataatgtcttttaaatttagagttattgttactttataataattattattattgtcataggtagtgttaggttgtgtcatttatgtaaatacttatggagtagtaacatgatatagtagtctacctcagaaagagatttattgagtctatgatgctgaattatagttttgtaatatgtttctaaattctttatgatggagtcccactctatcacccaggctggagtgcagcagcacaatctcagctccctgcaacctctgcctcctggattcaagcgattctcctccctcagcctctcaagtagctgagattacagtcatgcgacaccacaggcagctaatttttgtatttttagtagaggtggagtttcaccatgttggccaggctggtctcaaattcctgacctcaagtgatacgcctgccttagcctcccaaagtgctgggattacaggtatgagccacggtgcccagcctgtaatatatttcattccaacttttagatagcttctttatcaggtgctgcaataaattgtttgccctagatcgaggtggggagagagccctcttaggatgagctgtcacacagtaaaagataagatttcctggatcagttttctaaagtgacaggcgtgtcccctaatcgagacagacagtgctccattttgacaaataggccagacttctacgtgtgcatatttgttttgtgtgtgtcasagtgagggtgaggttgaggagtcattctgttcttattggaagtgaatcaggcataaaagtgatagagcgcttgaatgagatgattgcagttgaaagacacagcaattaagcagatttcagactttagagagcatgtcttccgggagctatccacggtactgaactgcttctccctatattgtcctgtaaccccgcaaaacaaaccttcaaacattttaaaaccacaagacattttaaaaactggctttggttattccttackagacaaattctctaacctgtgtatttctaatacttgttatttgtttaatcttggctaggtcarcccatttttttttgtttgatattacacattcatccatttatttattcaacaaatatgtaggtacaatcttccgtatgttgggcagcctcctagtggttaaggtgcttaggtttcttattatgtaatgctaattattattacttttgatttttctgggatttactctaaggaagcagatttaatgattaaaataattctacttcgtgtgtgttgtttgaagaacttggtttctggcccaaagatgatgctttgtttacagtacctagaacagccctttggcgtatcgtagacactcaagaaattgtattcacagcataaacatgtttattgttgtggagtgattttctatgaaatgttacaaggaaaatatatattttaaaccaacaagtaatctttgcaaaaaaaattttgaataagaaaaatattgttctaagtaatctagatggagcatacacctagccttaaagagtctagaattgacatgttgggacattctcatatgttaagaccacattacaggttgaccagaaaactaggaagaaatagaccagatacttcctgctcaggcttttatgtgcatatagaagctcagtgatctttttattctgttttactcaggctattctgtattcaggtaggatatctatcacccttactcttctctaaccccatcttaaaaaacaaagcggcggggagtttttcttttgatatcagcaacagataaccaaataagatggcgtataatcctttttttttttttttttttttttttttttttttttgagatggagtctcgctctgtcaccgaggctggagtgtggtggcactatctcagctcactgcaagctccgcctcctgggtccacaccattctcccgccttagcctcccaagtagctgggacgacaggctcccgccaccacaccaggctaattttgtttctgtatttttagtagagatgggggtttcaccgtgttagccaggatggtcttgatctcctgaccctgtgatctgcctgcctcagcctcccaaagtactgggattacaggcgtgagccactgcgcccggccagaaggtggagtgctattcttaactgtccttttgtagttctttgttctaagaatttggaaagacaagttagtcctgacttccatggaaatgttttttttccaaccaacatgggtgtaattctgaaggagaattctttcttaccagtgactcagtccctctgcagggcacagaatcaacagtattcctagtgtttgcaagatcagtgattatatagggtcagtataggcaaactctccatttccaatccgttgttaatgaaatgttatttttgggtgaagttctgagatagactgaatctgagcagaataaaaaaaagtggaatcagcctgagttctagcttctacccctatttctgtgatatgcttccttattgacatgtgggctttgaaacttggtaacatccaaattgtattatcactctcttgaaaatgtcattgttccatgaaattgtgagacttaaccatttttattgatatctcagagaaaccaaatcttgagaactaagagcattggaggataagctcctttcctagagatacttactctacttttggtcatggaccaaatttggagttattcctgtggatttttttctcttgttccttaaggcagtgatagatgcttgtttagtcaccataagttgtgagaatatgtggtctcaataaagacccagcaataccttgtttttctactcattatccagccccaaartttaagatctaaatgtttcctggtgagaatacaaagaaaagtgagctcttatagcctgttgatgggaatgtaaattagtgcagccattatggaaaatagtagagaggcttctcaaaaggctaaaaatagaactaccatatgatccaacaattgcactattgggtatttatccaaaggaaacaaattcaggatattgaagagatgtctcctatttattacagcactattatttatttatttattgcagcactgtatatttatttattgcagcactatttatttattgttaacactatttatggcagcactattcacaatagccaagatatagaatccacctaggtgtgcaagcatgaatgaataaagaaaatgtatgtatacagaatggcttactattcagccaccaaaaggaatgaaattctgtcattcacagcaatatggatgagtctggagggtatcatgttaagtgaaataagtagggcatagaaggataaatactgcatgtccttacttatatgtgagagctaacaaaagttgagctcatagtagtagagagtagaattgtggttattagaggctgtgagggggagggggaagaaaggagagggaacggttggttaaggaaaggagaggagaggttaagaggttggtgcagggttatagctgggcaagaagaatactttctagtgttatgtggcactgtagggttaaatacagctggagatgatttatttatattttcaaagatctgggggagaaggttttcaatattcgcaacacagagaaatgatgaatgtttgaggtgatagatacggtgattaccctgatttgatcattatgcattacatacatgtattgaaatatcactctgtatactataagtatgaataattatcatgtgtcaactaaaaataagagggaaaagtttcaaaacaatatctatttgttgattccatctgtatggcttagtgataatgtaatcttttgctgtcttgcattgttcccatactggatttcatgactaatatctttgcctttgactgatttgaataaaaatatgttaaatgaacagagaatcttgacctcctttcagaggctgaaggattccttaatttctttcctccatttgcttaggaatcagtgccattgactgtttgcttttagttaatacggttttgtttgcttaatacagaatatgtgcaatttaagtgtcatatgtacataataagatgtaatcttttaattatatgatatagcataattatttccattttatatatgacaaagttaatgtttaagaaagttaaataactctaattaggagtcaggattgagaatccagacacagatggctctgacatcagaatcactgctttaaaccactcttcttttctgcttgctttaatattcctttacttcctccataaagtgccacatcagaatatagaacaggttattaatggaagaaatatttcaatattttgagttttttgggtgaatgaaaattatagaattaaaagctgaacatcattttatttggcagtttcatcattatgatttaaaataaatgcagtttttgaagtttcctaatttattctcttgaaatatatttggattgccacatgctgtatattctaacacttggccctggtagggtttatttgtatatgtgtgggtgtactttaaatataaagatctcactgattttaacacacattggaaatatgcataggcaaaccccaaacaactttttattcaatagtgtccatgtatctctaaacttttgatagaaatttgttccaataatggggttactacataagttgaagaaagtcaaactgaagcaaaatttgaaggcttctatattaatgatcagttttaggcgatacttgccaaaayctagttcaggattagaataggctgtgttgacattttaagtgagacatatcagttactctttttcagaaagttaaaataaattctcataatgaaaaaataaatgataattttagattcttttagagaatttactacctttacaaattaggaaaataatattcacagtatccatgattccaaccagttaacatgttggtatatttctttcagttatacacatacacataattaacatataattatatgaatttatatataattttgcattctaactttctatttgacataataacagtcttattttgcacttttatgattttccaatgagatatatctattagccatttctattttttgagttgcctgtttttttgtgtatgcatagatatatgtacgcctgtatatatacacgtatgcatacatatatatgttttttgttttataaaaagagataccatatttctattaataccgtcacagctctgatccttctttctattgtagagcttctatgcatgtattaaaatttaatttagaaccaatcaaggaagaggtcaatctgaataagataatatttgtaaagttcttgcctgtattatgtatagcaactagagctactttatccacagcgatttgaagccatgttgaacctatacaggttaattgatgcaattctcttggaaacatcgtcatctgttggcctataatgttttaaaaaccttggaacagtctcattgttttaagtatatctcctagttttttcctttaatttgtttgatgatatttttattttcttaagatcatcttcagctgaatcctgacaaccctactacatgatcataacaaaaaaagcaatgaggagtctctataccctttattttcataggaaaatattctaatatccacaaatgtgattaaaggatagagcaggtggtggggcgaggtaacatctgatgtgagaacgaagaagcaaacagttgttatttttactctggtcaggtgaaaacaagcagtcattacatgtctaaatcttgggtatctttggaatcattttcagccaccgtagtaagttgtacgtgcttgagtgtttttaaagcatgtcttatagtgaccaaatgtttctaccgcatttatctcagtaaagttgacaggattctattaggacgatcttcacctaatgagataaatattctaattgtaatcatcctcttggaatgcatatctcttctgggaattaaaagtgctttaagtggtgttgctaaacaaacatttctaaagagtaatcataaagttaaatgcctcacaatagcacaataggctttttagttgacctggtttttaatacttttttcattgcaaaatttcttattctggaaagtttggaaaaatgaggaaaaaaatagaaagaaaaatgtcgaatttaaacattttgtcactacctagttaaaatcggggataacattgtgatttagatttctccagtctcctttctttttttttttttttttttttgagatggagtctcgctccatctcccaggctggagtgcagtggtgcgatctcggttcactgcaagctccaccttccaggttcacgccattcacctgcctcagcctcccaagtagctgggactacaggcacctgacaccacgcccgccaatttttttgtattttttttttttagtagagacggggtttcaccgtgttagccaggatggtctcgatctcctgacctcgtgatccacctgcctcggcctcccaaagtgctggggttacaagtgtgagccaccgttcccggcctctccagtgtcctatctcaattcytattcaattgtttgttaactagattggaatcatactgtgcatattgttttataatttgctgttttggctgacatttggaaaaattattttagaaaaaacagccagttttgtagatgaaatggtgttttgtttctattgatttttgatttttaagttgctattacttcatgaagttagcgtctttcttgtgtattggctattctcttttcttttgctataaattgtctgctacatcttttagttcataataattattgagtcattttctgtttaaatataaagtatttttctcatttgtcgctgtaacataatccatttttaagaagcagagcattttcttgacagagttttgaaatattgtgtgactttatggctagaacacagaaacattagttagaatttcagaatcatttgatcagctctggctttgagcctctgattctacttgtagtctccaaaccaatctttggtatccttctgtagagatgtaagttgttatcaccaactcaacatgaaattgtaagaatttataacagtgttttctaaaatgatttctttgatttattcaaagaaatattatctctgataatatatttcagtatttttcatattgctcaatatcagacgaaagttcttataaaagtcctgattgtttcagcagtgatttgcatgccattagcaggtcattcatccccttccactttgaggctcaagttctacactagatttgatttgttggagggagtctacaaactctgctttcactagaaagacatgatctgtgtgctttgctgccatagtgggcctatccacatggctcattctctgtaacactaacttccaggaaagctcttgtatcaaaattcatcaccggtattaaacagtgtcaattatttttatcacctgttgaaagcttaaatgccaacagaaatttgtgcttcacagggcattgggtcctccatttatatttttcaaatgtgtagtatactcttgcttttagtcgtctattacccagtgttcttttcggaaaatatttttaaagttaattatatactcacagataatagtgcaagcaagtttcctccatgttctgctttcctttttctgactttacttcatgctacattccttcacaaatagtaataagaatttatttctactcagaatgaatgttcctcacagtggagagaatttgccactacaaaatgccttctactctgtgtttaaattcctcgtacatacaagcaggttttgggtgttacatttgttcatagaggtatgaaattgagagtcatagattgaaatgttttttatagtagagactcccaaaaaaaggcacagaaaaatggttgatatctagtaggagttatttacatgctgctatttctgatgcttcctatttgtttcttctgaaaaagtcgcccttcctatgtctcaaaacagtacacctgtaaaaccacatcctactgggcataattctacaactgcttctattctcaatgcttgtgttgcatgcttttggaccctaagagaaatcagcaagctataaacccaggaccaagaagagcatatatctcttggaaaaatagcatttgagtgattgaataaaacaggctgttttggggatcattccaaatgcagggaacaatatggatctgtgatacttgagttgttggactttgtagaatatcaaagatgttctgcttttcatattcagatttttaaatagaaggaaataaacaatttttaaaatgtttggaattaaatgggggaggtcatctgtaactgtctttgttgatttttgtgggcatcatagcacagaagagttctcctggcttagcattctggtattgctcacatatcacctatatgctaatttgagagcgttcatgagtgccatgaaggatgagtcagaatgatagacagtatgctgactttttctcctcttattgaatttagtctgatctgctagtgagagaaataaaagggaaataaagcagggagtataatagggaaacctattttctccaaatgttgagatatttaaaaagtctttgttcagtgtacctgcagttataatctttccagagattcatgagatgtcagggctaggcaagactttagaattctatgtagtaaactcttgtttggggctgggaaaatggagggtcacagttagaataattgcctaaagccacaccgacagagagctggtagtggaatccctgttttctattcaccttcctactcagttgcactacaagtttatcctaattcaagtaagcttagacatcaccttgggtaactttctgatttaccaaatccactagtggaccatattgaatttgcttccaacatgaatactcttcatttctctccatccacactgctacccaccaaaatcccatgccttgaatgtaaataatcttagagctgatctgtttgcttctgtaacttcctgctactcattccataagcaacagaagaggcaaaatgaccttttaaaaagtataatttgatcattattctcctttacttaaaatcctagaatgacttccattgcacttaaaattccaaatttctttccatggcctaaagggtctacttgatcagtgtatcgcctttctctagaacttaatctacctctgacccttgtgtgctatgctgcagccactttggcctcctttcttttccccaaaattgaagacacatttccatctcagggcctaagtgtttgcagttagctctgtttggtgttctcttctcctagctgtttacagctttcagccttctgcagagatgttccccagctaccctgccgaatatcgcctttccccacccaatcctttcattaccctattttttcatagcagtaactactaattaattatgtctttatctattgtcttttcccagtctccaactagattgcaaagtccctgagggcagaggtcttgatgtcttttccattaacaatatctcgagtaaccaccagcaatctgcacatagtaataacctgaatattcctttaatgaatgaataaactgaaaaccctaaagttcagtaatactggcctctgtgtagagtttcagaaatatgccaaatatgctttcaagcatcccagcctgtctagtgtatcctttgctctcttggccttctgagatcacttttaattggcatcctctgaagttgttactctcagtcatgctggttgataccccgaatggataggaaatggataggcattttttctgtccatctctaaacatctctgattgggcctaatatacctctcaggcctgctcctctggccaggacccctctttttatgggaagtagggagacccaggaacacagaacctataatatattagaacctgttatatatctctctagaaaaaacagttattttaaggaacgtgattgctggggatggcaagtcagaagcctgtagggggaggcctgcaggctggaaactcaggtagcagttgatgctgctgttttgaagctgacttttttcttctatggaaagcctcagttattgctcttaaggcctgccaagcaatcggatgaggcacacccacattgaagattatctcctttacttgtggtcaactgattatagatgctaaccacatctaaaaaatgccttcatagcaacaccttgattagtgtatgattaaataatgggacatgatagcctagccaagttgatagaaaactacccatcccatcatgcatttgtggtattggagaaaggaaatgcttctccattgttactactgggactgttactgctgagacacaccgaagaggagaatttttagtttttagtttgctttttagcagaattcaaacttaaatataaaattaaccaaattgtcagaaaggactgaaggttatcctttcaattctgagttttttatgtaaaattattttattattagcaacaggttttgaaaacatttatcaattatattcttatatattggtgactttaggtaatgaataaatctggatttatctttctttataataaaaatatggtctgatcaaagtatataaaattgaaataaatattgtcttatttgtgctttaaattaattgtagtataatattaataggatattatataatattcagtcattttagaataggagaaacattttagggtaggataaacaagaccgtatcatgaaattggagattttaattgttttgtaatattaaattttacctctcatgaaaatagagtagataattattatggattatgaaacagcataattagttgtaacagttttaccttgaagaaaatatatcttttttataagcagaaaacttcattttgttttctttaaaatgaagtgaataccggccgggcgcggtggctcacgtctgtaatcccagcactttgggaggccgaggtgggcagatcatgaggtcaggagatggagaccatcctggcttacacggtgaaacgccgtgtctactaaaaatacaaaaagttagccaggtgtggtggcgggtgcctgtagtcccagccactcgggagtctgaggcaggagaatggcatgaaccctggaggcggagcttgcagtgagccgagattgcgccagggcactccagcctgggcaaccgagcgggactccgtctcaaaaaaaaaaaaaaaaaaagatgaagcgaataccatctctactctcaatgtatcgtggacgataataactatgctagtatttctgcatagtattcttaaagaattctgactgaaaatatttaaatgaaatacacataatcactttgccacctaatgcccatcaatcattgccaacattgacttttaataaagacacataaccagagatgatttttaaaaattatggataaattacattagaaaatttagctggagcaaattatatttgattattattaacctgccataatttatattcattaaattgccaaatcttgattataatagtcaaaaagaaaaggtacatgataatgatctagaggtagaacacatgctatcaactggaaaactaattgttcagcatcctaagtgtatttgttgcttaattatatatataatttctacaacaagtggaatgatttacatgaatgtcaaataactggtttataaatgaaacctgatattaagctaaataaaatattggcatatagtgttcacttatgagctaatattcttacctctagcttcatttacaaattarttatgctacaaatatattaatgttccacaactctttcacacttccatcaatatcgagtttattccattacaatgtgaaattaaaaaaaactgtagaataattacttctgcttcagaaaatatagattacctatcttccagtaagatgctgcaatttatttagataactgcatttattgcattgattttgaaaaattgctcaacctaataccctttcttctttgctaattcctggggaaaaggaatccttttcattttgatccaaatgaccattaatcatattataaagtgtaataattaaccctttttttaagtgtcagagacacatgaatagtgattttatttggtttcaataatcaagtaaattaagtgataaaatggaggccataattaagtgatcttgttttctaataagaccaacccattaatgtgcatgtaaagatgcctgtcatcaatttaacagctttctgagtttaatatacattaagagttttatttttggaacaacttagtaatttttagaaacttgagtacaagtgttggcaaaggttctataaaattctgtctacagaatatgtggaacacaaccttgggtcgtatctccaaggaaaactaccatgattaaaaagacaatgctttgtcaaattcacttgttatcacaatctaattgtgtwaaatgccggccacattytgagtagacactttaacttggcttyccttgggaaataggaaatgaagggcccgaaagaactagaagctgcctctcaattttytttcaacatggcaaaagcatttgcatttatctgtgcccctctcttggctacactctcagctttgatacactacttgagcatgtggaggtttacctactgaatgtgacccttatatgaataatatgagacttttgtatcaacagtagtgatggtttttgtttttaagtcacattttattgtatgtcttctctacctctcactatatgacaagtttagtgaaggcagggtctgtggctatcttgtttattattgttttatatcctgggggtatcacagtgcttgatcatagaaagggctcactaaatatttatggaaggaaagagaggaaagaagggagagtgaaagaaaaaacattcaatgttctcactcttaaaccaagaaaataattgtttactttatttcattgtagtaagaaaactgaacatgctactaccttcaataaatttttaagtctgcaatacagtattgttgaccataggaacaatattgtatagtggatttctagcatttgtctttcttaactgtaattttgtgcccgttgtttagtaactctaaattttcctcttcactcagaccctggcttccccccattccacaatttgattctgtgaatttgaatattttcatagaaaacattttatgagtagaattatgcagtatttgtttttctgtgactaacttatttcacttagcacaatgacctccaggttcatccatgttgttgtatatttcagaatttccttcttttttaaggctcaagagtattcgcgtgtgtgtgtgtgtgtgtgtgtgtgtgtatcacattttctttattcatctgttgatgaacatttagtttttttcacagtcttggctattgtgaatactgctgcaatggacatggatttttaagcgataaagaataaagctcttttcatcttttaactggaattattttttagaaaatattttgttccaattttatgatttttttgctattctttcatgattaaaagttatgtttcattattatcaggttgtatatttacatatatattttgtctgatgttaataatggcatgtttactttctttgtgtaagctgatgtatggaaaatattttcctagcttttatttcacattatttcatcttttgtttcaatcattcatcttgtatattttggcttccttcttcccttttactcaacttagaattttagagtgagtaacttttaagataaaacgagtttaacagataatttagcccattcacatttgttgtaattcatgatatttgtgtgtgtttgttatctcttcatttttgaattattttgctttttaatacatcttttctccatttcttctgcattaccttccttctttattattaattgaggttttttgtgctgttcttcttccatcttttttaaactaatgaattacaaaatttgcttctttttatgatttgtctcatagttattgttaaagttttgagacctgtgagtaaaaatattttatattaatacctagacttataaatcagtactaatatcttgtcttgaacaggacttcatccctagaatactttttatttctacatcatctgcttttaaataatcagatattaaatccagattgccatcgtttcatttttaaactttgcagcagagatttttttagatgtgaacataaggtgtctattttctttgcttcttgttattttgtgttgtctttctctttcttgggtaattttttgttttgttttgttgaatcagtaagcttttcagaaaatgcctgtaggtgttaaatttctgagcagttatatatctgaaaatatctttgctcttacatttggttaatactttggctagatttagaatttaaaattatgaaatgtttttctacagacttgtgaagacattcaatatttgtttcagcacatggccttagaaatgggatatctataccaatctaattcccatgtttctgtaagtaatatacctgtttttatcttctctgagatattttggaatttgctcattattcttggagttttgaaatgtcatcaaaatatgtctaagtgctggtcttgtttagtaatcttgtatacctcaggggaaatttcagtctaaagatgtatatcttttccttcagttttttttttctctctctctctccatatatatatatacacacacacacatatatatacacgtatatatacgtgtaaatatatgtgtgtgtgtgtaaatatatatactttttatgtcttataaaacaaacgttgggatttctgtttctgttctctgtctaaacttttttatgctctccaggccatcatgtgcttgtcctataatctggaccaaacccanggtacacatttgtagctcacaaattcttcactagtcaccatctctgacttatcctaaatgaaatttttttttatttttaaagtgattatattttaaatgtttctttttataaaatgccaaccagtttttcttaatggctgtaatgtattgaatcccttaagctagttcattattcctatttcaagatttttttctactccttctattaattgttttttttttttttttttttgagaactagttttgtgttgtttgcattggagtagcatatacaagccattgtttctgacccgagtgctctcttttagaattttttttttttttagggtcagatcccctcatctagtacctctgcctttaaccgcagtctcatgaatccaactgctattcagcaccttcgactcagatgtctgataggcctgtcaatcttgggagacccctagctgaacttccacagaaggatgggtctgctccttccctagtctccccatatcaggagatgatggtacccttcaccctgtagctcatgccaaccttggattcatcctgatacctttcttgtcctacattctacatccaatgtatgaacttgtgctcacttttatgtccaccttcaaacaaataccatatctgactgtctctcaccactccccagctacatccctaatccaagtcaccatcatctttcacttactctattgcagcagcaatagaccaatctgggctctgcttccattcttttcaccctatgtttattatgtattcagcggcctcagagaaatgtaaaacataaatcaagttccatcactccctgcaaacaacaacaataacaccccttataatggctttaagtcctaagcatgaccaatacagccatatgacatcaaggtcctgcttacttctctgactttctgttctataatttctataatgtctatcattgttcactgtgtttcagtcatattggtcttcttgctattttggggagtatgttcccacctcagggcctttgcacagctgtttcctcacctagtagctctttctctagatattacttggcttcctccctccctttaattgtttctcacacaaaatgcacctcctcagaaaaggattgctctcatccagttatcatccactgtccctctttatcccttttccctgccctttttcttaataacatgtaacgctgcctggtgtgaccaagataggtttgtttgtgtttgttgttgttcttcaaaatagaaacatgaccagggtatgggactgatgacttctccaccagcatatcctctgagggtgctgaatcatttctgttacatagtgggtgcagaggaaatatttgttacatgaggctatatatcaaagggcttcatgaaggttttgctttactgtgaatctggagtcagataattcttttctttatttctcctctgttttctttgtagagatcatgaatatcttaagctttatggtgcctctctctctatagtttggctatgagcctccccgaggcagatggttaactttatttagaaagagggtttcaggactttattctagtgataaataccgtggctgctagtcatagaataaacaagggcatgagagaaggcagccaactagaccagctgttcacaccatggtcctttcataattatcctggttactgcctcttggctgtgtgtattgcttgactccaagtgtggggtgtcttttgtagagctttatctggagctgttttagggagaatcaatctcacttctagtagatttctcctgtgtaagtgtgggctttgatttcctctacttctatttctactaagcccattacttatattaatcccatctactttcaaccttcaaggacttttatttttcaaatttctgatctgatagttaaaattttccccgatgtgccatgcacttattctaaaatatgatttttttcctggtgtcaataagatttggcgtacagggaaagacagatatatatgacttaaattttgtcttctttgcctctattgtatgttactgtttttatcttctgtgttgttgttgttgcttaacaaatgtagctacacatttatatcttatcactgttttcttaaaaataatttgttttgttcttctcccttttatatttagaaaatatataaaaaatgtggaccatgcctttgatcagaaattattatgaaaattgttgtttagaatgggtttgagggtggaaaagtttattaagagattgtaatttaacgaaagagaggtatgaatattctgagaattgaggtgtcttatgcattaattggattgctagatggccccactgatttcctgtttttcttgttgtgttaatctatatattgaattaagcacctcaaactatgagttattagatctcatatatctatatccctacagcaatttctctaagctctggtcatttctgctactttgtaatctaaaactgcttcataacttcctagatagaaatagaatatgtgggtgctcagagtatcagatagaccccatatataatagctatgaaatttcaggctctataatggattataggatatttttgaaccttggtaggttgtaggattagttgcttaaatacatagtaccatagattgcaaatgtttaaaaatcttgatgctggaatttattagaaaaacaggaatgaatacagtttgagaggctagaaccgtggatttcaaatgctagcctgtatgagggtcccttggagggcttcttaaaatacaagttgctggttgtcattttcagggtttctgatttacgaagtataggatgggcctgagaatttgcatttccattaaattcccaggtgatgtggctgctgctcctgggacaacatttagagaaccgctagattagacagtctcacaacagggatttctagggacagcttaatggttactttatgatttgaagctggaatacccaattaggggtttttccagtctcatttcatttcatttcatttgcttccttttttctttcttccttcctccttcccttcctcctccccttcctcctccttccttttttatctcctctccttgcccatcccctttcctcccttcccatcccctcccatctcttccccttccctcccctcccctcgctgctcctctcttctcctctttctttctttgccatttcaggtgctttatctcttaagcactgcactgctttgggttatccatttaagcttagaaggagagcaacagaaaaggaattgaaatgtaaagcagatatcaagagagcaaaatttgtcattaaattggaactagcaattaatttgtctatttattcatagtctaagtgtgattatcaaaaatgcttgagaatcaatagaaccacatgggtttttcaagttggataggaccactgaagctacctggtggaaacacatcattgtattgatgagaagactgaagcaagaatatgaaaagcatctgaaccaatgttttcttttccacgttctcatcactctctgctacccacagctgcccgtcatggatatactatatgttgtcagctatattttgattacttctctgtatatttatcatcatagtttactaaaattgttagtattataccttttgcatataagaaaggatgaacatttctagttcttaaaatgtaagaataagtgattacatattaccttgaaacagtatggaacactttttactttaaaatatttttttcaatttttgtgggtacatagtaggtgtatgtatgtatggggtacatgtgatactttggtgcaggcatgcactacataataatcattttccagaaaattgggtatcagttgcctcaagcatttatcctttcaattaatgctcttagtctgttggtattaaaacaatttttattttctgatgagaaagttgctgtcactttgatcattgactttgctacaggaattttcttttcttttcttttcttttctttttttttttttttttgttttttgagacaggtctccctctgtcttccaggctggagagcagtggcacaatcatggcttactgcaatctcaacctcctgggatcaagtgactcccctgcctcaaccccctgaccctcactatctgggactacaggtgcacaccaccacgcctggctaaattttgtattttttgtcaagacaaggtttgtcatgttgtccaggctggtctcgaactcctcggctcaagtgatccacctgccttggcctcccagagtgcggggattataggtgtgagccatcatgcctggccaggaattttcttgaatgcttcaataactttattccatttaactctcacaacaatcccatcaaatcaagtatcatgattatgcctcatcattcatttcacaaattaataagcaaagtcttagggggttatcacttcccaaattattacatgccagtgaaaaaccaaagtttgagcttgcacacaaactttgaaacactattcaaaagcagtgttttcagcacctgatctttattgcctcacagagttttatacagatacaaaattatgaaatgtagctggagccaggaactatgacatggaatatacctggcatacacatggtctttgtcttttcctacatctgtgaacttgttgaagctttagatgtcttcccagctcagtgatcatgaagacgtcctcactgatgagtcatctttacttgtcatctctagctacctggaataaaacacccagtgtagtgtctgggatccagtgggcatcgtgggtcagttagttctccagccccggttccttttctggttgcctgagcttggaaaattcataaaatctctttggacctcagttacgcaactgtgaaattgtgctatagggtgacttgaaaccactttgtagattttttgggagagctaaattaggtaatgcatgtaaaagcatttagtgcaaggtctggcacataggatatatttgctaaatattcgtagaatcagatgaataactctcatgaaatattttgttaaacattgtgattgttcactgggaatattatatggctgtgtgtgccactgtccgtgtttcccctaataattaataaatattaaataatttaaaattaaatattaaataatttaaaattaaatattaaataattaataataaatattaataaatacctttggcaagtatatactatgtcttcaaaatgtttcttttccatttaatgttttcatttatctgcaacatttcttaaggcttatttgcatgtgggtaaaattcaggctacaataatagtcaaggaagtatatttctcttgttctgctcccatacaaatggtgcccccctgcaagcctcttctgaattattcctggacacccaaataaaaatggtaatttttctttccttttctcctggattcttattctaacatctgctaggaggatccacaccctgtcctaggctagtagtgtacagaccatggttttgatgtctgtgcaaaaggtacaggtttgtttgcatctcttcaatttttttcattgtatgaaaatataaataatataaaatgtactatttttaagtatacgattcactggtattaaatgcatctataatgttgtggaactatcaccagaatccattgccatagctcctttaatcttacaaaactgaaaagttgaactctttacccattaagcaataactccccattccccctcacttaagccccgggcaccactattctactgtctgtttttatgattttggctattcaaagtacttcatataagcggtatcatgcagtggtatctcatctttttgagactggcttatttcacttagcataatatcctcaaggttcatccatgttatagcatatttcagggtatttttcctttttaagactgaataatcatccatttatagatataccacattttgcttatccattcatccagccacgggtacttgggttgcttccactttttatctatcatgaataatgctataaacatgaatgtacagatatctctttgagtccctgctttcggttcttatgggtatataccccgaagtagattgctgcatcatataataattctgtgtttaaatttttgaggaatcaccatactgttttccacagcatctgtaccattttgcattcccaccaacaatatacaaatgttccaattcttcgcattctcgccaaaatttgttacatgttgttgcaaaagtaattgtggtttttgccattaaaagtagttacttttgcaccagcctagtatttttttttctgagtttttttttcttttgttagtaatgggtgtgagtggtatctcataatttttatttgtatttctatagttgttattgatgttaagcatcttttcatgtgcttaccagtcatttctgtatctcctttggagaagtatctgtgtattcagcgtttgcttattttcacattgaattatcagtattttttgttgttgaattttaggagttctctatatattctggatattaatttattgtcaggtacagatttggctttgatggcactaaagctacttcttcttaccttcgaagtcacagtacctgtaatgattgcttatgtttagcaaattaacatcattaggctttctctgtcattatataaccccttcatcctaagactcacacatgagcacctcaactgaggctggggatgtgtgtccctgttgttgggggaacacatgtccttagctctgactccctttctccagggtcatttctatcctctcttccgatgacggtctaccccacagatcctaagccacatccaagtcacctgaattccagcatgattcttacttagattcttaagtttaaatgcttgtaattccttcttcctttcctctccttattaagtacctttaaggaagtagaaaactctcaacatttagaaacacttacaagcatatgaatttccatattattaatgcctcgtgaccaagatgtcctgacacatttatatggtcctgtaaaagttttataaataatctggagcatattatttctttatatcctcactttgtgaactagacaaggtagatattaaaattccaagtctcaggaagtttgaatgatttttcttaagcttagtcagctaattaggagcagaatcaggactggaatttagggcttctggctccactttatctctgaggcttgtactattctactgggatatcattagaagaaatgccaaatgaatgccattgcctcttcagccctaaacacaaagcccagttaagtgtttccctgacatttttcctgacatctataaaaattcatattttatttttattcacatgctgattgatttagatgttatgaaaattaaataagttccaaaaggcagaagataggctatacacatatttttaaaaatttgtcattgttcaaacaatattgaatataaaattgaaatgtccctcattataaaaaaaaattctctaagagtgactagttataaggttatatcttttggcatgatgcacctctaagcagtgcttgcataaagtctctaccaaagctgacagagcttccctaagggcctaaagaacttggcaaatgttgttgaacaaaaatgacaacaatgaaactgtgtaggaggattctgcattagtgcacctaagaatgttctcgctaatttgagcacttctcaccatggaataatgcttttgttcctctctgtctttttctgctgtctcacagagactcctaacagggctccctggaccaggcttagacatcaatagggatggactagaggcattccatggaggtgacaattacagaagatcagaagtgcctagctacacactctattttcttctagcatctgaaattattgacttgaacccatttgtggggtcactaagccaccttcatataatatttattacatgtgcaaagtcagaacatatggagagcatttgcatttgaatgggggaaacatgctgttagataaattagaaaatctttatatttgcatttttctttatttaaaaaaatcaatctgtggtatagtagagctaggaatattccctttttggttgacttcttcactctgtgtttaaactttctcagcattgaggcatgtgattaaaaggagctattttcctaatacaaacaaaagcattgaacatcctgtgaaacaaaagttgttcattttaacttgcgttatatggaaatgtgacatgttttagatttgtgtaagctcatgtacttgaaaatcagacttgtctaaaatttcttttgtaagatattagagaacttttgaattatacctcttatttttgaatgtacattcctcagagaatcatctttatgcacaaataatgtttattttatatttttaatctactttagcagacccacstgattcttctacatgtaaggttgaaacagttttgagtgataaagaactgattttatggagcaactaatgattttgctgttgctacttttgtgccagcaaatacgtaatccacaagaatgttataagaaagatatttatcaagcctctaaaaaaraagaaagtaatcaaaagataaggatgcataaatatcttaagactactcatgacatcaaggaaggtgaatcagtattaataattcactagtttgtgcatacttattgtcaggtgctgggtcaaattaaattggaatgatttgttgacatgaggatttctgggttcatgatggattcacattaaaacaatttttatgttttaagccttctcccatcaaataggttttacggtcttgtgtacacattacatgagggaaatagtactttaacattttacatgctggtgtatagtctatatcagcagtccccaacctttttggcwccaggaaccagtatcatggaaggtaattttgccatggagtggggttggggaaaggagatggtttagggatgaaaccgttccacctcagatatcaggcattacattctcataagaagcatgcaacctagatccctcaaatgtgcagttcacaatagggttcgtgctcctatgagaatctaatgctgccactgatttaacaggctgcggagctcaggaggtaatactcgctcacctgctgctcacctcctgctgtgtggcccggtccctaacaagaccattcaccggtaccagtcagtaagctgggagttggggacccgtgttccacatgttataaaaacttaggctgggcgcggtggctcacgcctgtaatcccagcactttgggaggtcgaggggggcagatcacgaggtcaggatatcgagaccatcctggctaacacggtgaaaccctgtctctactaaaaatacaaaaaaatagccgggcgtggtgggcgcctgtagtcccagctactcgggaggctgaggcgagagaatcacttgaactcgggaggcggaggttgcagtgagccgagatcgcgccactgcactccagcccgggcgacagagtgagacttcttctcaaaaacaaaacaaaacaaaaacttaaagagttatttgagccggacacagttgcatagacctgtagtccccagctacttggtgggctgaggcaggaggattgtttgagtccaggagttcgaggttgcagcgagctatgattgtgctacttacactccagcctgggtgacagagcaagtccctgcctctaaaaataaaataaattcggaaagaattatttggtgattcaagtataaaacaaaatctatcagatatttgtgaaaaacatattgttacattgttacatgttttaagaagggaattaaactcctagactctgtatggtataggagttcaacactataggttggtctatacatctaatgttggatatgtattttgtgccttttatttaaaataacatacattttatggcatttcttgctttgcattaattactggccatacccagaatcctttccttcgaataaaataacctcttttcccaaacttttacatattgttcatattttcaaccccctacacagttgttaggtcttgaatttggaagaattaaagggaataacattaatgacagtgaactatgaattaggaacctcacccctatcaatagccaatttccctccttttcagttttgtgtctcagtaatagtccttaaaacaacaaatgatacattaagtgacctgagccaatttcctcttgacatggaactattcaacaaagcctcacataagctaacatttcctaattagccccttaactgttgacttgagaaagggtttgcaatacaggattcttatatattaataaaaactataggtaaaaaattcaagatgttgttgaatctttacagttcgactcattattcaaattcttcatctttacatcaagtttctcatctttacattcctctaattcaggtcatctccacaatatgtccaataaaccgtatttgcaagatatcgggagaaaagcgagtctgcctctaggaattataactgatacttcctttgtgtgatgaacagtgattttttatgtatttagtcatatgctattagggaatagatatctctagatcagagaacagattgtgtattagtcacagaacatcttagcactagttcctccagccctagttcctgtggagtaacgcgatgagggccagatatctatccccatgggcagcagtgttgcaccgcatgagaggaaccctggaattatgaaacttggagcttacacagggcagctgggcacatctgcccttcctcccctccagagatagaaagacttgtatgtattctggcatgtaagcaaatgactctcggggagagtaaaaagatgcctccaggttttatttcatgagcatatggctccagaggagacgcatctctaaacctctcaggaacagttcattgtcttttacttctgagacatactgtccattcagtcattctttagccaaggttgccagtactctttgctaagaaaccccagatcatgcagaaatgtgaacatgttcacagagaattgtctctcaatcaatagtacctagtacattattatacaaagttctggggatgtttggcagggattgaacccatgaactagaattatgagcattggaacttatctaaaccaattagcaaataaaaaagttacacatttcttgagaaaataattttatagattaataattacatgtaggatatgcatatctcaagtcatctgagggtttaatgttttgtatactttatcttacaaaatagattccaattcatgctgtctggatatacaagcattaaggccttccaaaggcaaaatcaggctaggtgtgaaacatgagtggtatacggaggtatagcaagtagtgtcccttgatacccttggggaattggttccaggatgtcccagagataccaaaatccatggatgctctagtctctgatataaaatggcatagtatttgcatgtaatctagcccactttcctgtatactttatatcatctctatattagatataatgcataatacaatgtaactgctatgtaaatagttgttttatttgcattgtttagggaatatgacaagaaaaaagtttgtacatgttcaatacagatgcaatgttttggaatgttttggggcatatttttgaatccacagatgcaaaacccatacatataaagggctgactgtatttaagttcctcattctggtgtgattaattttatctctttttagtatacttgtggttctcaagtcactaatgttttagttataaggtgaaaggcacactgtgtaattgaatgctaaggccaattctttacctctgatgtctggaataagagccagatttcccatccttttatggaactacaagcgtcatggctattagcaatcccagaatagttctactcccactttggctgagtttaagatctttttctaaagacagtaaaaagagcatcagaaaagcatttgtgaggctgaagtacctcacataccaattttgtgggcacatttttggacccttaagttctttttgacagttttataaactcatgcccagagtagtttcctttatttaatatttgtcttaccctctacttacaggaaatgcaaggctcatcagctttttcagggagtagcatgactcagagtctgatgtacttgaaaaaaacacagcgggaatccaaacacacttatgtcatttttatgtgttagagagaaaccaggaagcatgaattctcacttttcttaacgtctttacagtgtcaaagggatatttgtgaaaagaggttgtgggaatcattgttctgaagtgcatccaagattagaagcctggtttatgtgtgctattttgcctcccagtatgagcagcctttttatatttattccaagtattactgtaaactactttttctttatacatacacaatatatctttgtctgtgatcagagcggagcttcatttccactgaccaatagaagggcatttttatttgatttaagtgaaacttggggcataatgcattctttcaaacctctgattggacatgacaaacaaaaagcttgagctagaccatggtcatctgaactatttccaataacttacctttgtaattggagtattgcctcaaatatttccctgaactctaattaccatggatacgatatcactcaacagaactttttcttaggagcactaagagtgtggaagacagaggataaatgttgtagtttcatttgattatctctatgtggatgctcacatttttttttctataaccaaccagtttcattttgatgagagtgtttggagagatggttatgctgacactagcctaggtaagagagtaagtctccctctcttaaaaaaaagtgacaatgtcacttctgctcacagtctgttgatcaaaatgaggcaaacggccaaacctgatgcctataggttgaggaaattgtgtatttgtgaatagtaatagcacagcagccactaggcctcccagtcgtactggagatttctaaaaggcaaagtgtttttagtttgttttaggtaataggttgatatttagcctattaaaaaggcagaccctggcttgacagacaaaaattaataattaatttgggagccagatacagacttaggttttttgaattcttgtttctatattcttattttggaagtttacagtttggttttatatgcaggggtgttagatgaaggtgtattgttttgcaaatagaaacagtctcaggagacaaataacaatggcatgagaaatttatgaagtttatttttagcagcactttcaggcaaggttttgccatcaatattttcattggtacccaagaagccaacagaggaggccatgttttatgaattgatgtggctacaaatattagctctgacattttttaagtgaaaaatggcagaaaagatacagaagcaaataaatatagagtctctgacagccagcagagatggaaccctttctaacaattatgaccaaaggtatgtgtgtgtgtggtagtttggtttatacttgcttgaatgctgtccttgttctttttttttttttttttttttttggtagttcttgcaccaagtgactgacggcttcctccaaaacaatgtcagcaggacaaggatgtattggcagggtatcttttgaatcagtaaccccatactgatccttgacctaattaacagtctgctataggcatcttgcagtttactgctactgctatcgcaacatcaagaaaatgttgaaacttaagcacccataagaaacttaagggggtgtcccactcaagtcattataaattcagttttattatgctaaaattgtgtgaactatagttcacacaattcaggctggctggaagcctgaatactacattgttttatattataccacatttattggaagagttggtttgcttttaaaggaatccatcactattagtttcatggcgtatttaacatctggtcaggtcagttcaatacttggaaatgttttgatacttgaagtttccagcagattttaacacatgcctttggatgtaagtaaacacctttgtccacaataaataaaatgtaactgagcaaatgaaactgtcacaatgctttgaaaactgtagcatactgaccaaatctatgccatgattttaccttctactgatggaaagaaaagtaactttgattattgcaatctgggcaattcacttatgttatcttatttaactttcatgaaaatcttcatatagtagctatcattattccatttcaaaatgggaacagaagcttaaaaatggaataatttaaagacatacaacctagaagaggcaaagcttctgaatacaacagctatctaactccaaaggtcttggttcttataagaatccattctgttttatgtctgtgattgtaagcttttagcagtttctcttcttctatttctttttttttatattttttattatactttaagttttagggtacatgtgcacaacgtgcaggtttgttacatatgtatacatgtgccatgttggtgtgctgcacccattaactcgtcatttacattaggtatatctcctaatgctatccttcccccctcccccctcccccctccccccaccccacaacaggccctggtgtgtgatgttccccttcctgtgtccaagtgttctcactgttcaattcccacctgtgagtgagaacatgcagtgtttggttttttgtccttgcgatagtttgctgagaatgatggtttccagcttcatccatgtccctacaaaggacatgaactcatcattttttatggctgcataggcctagaaaggtgcagaaactgctttcaattcctgaagggacttgtcaggcaaaataaacatactgaaaatagctttgaccatttctaaatcctttcctggatcagagttggaggttgctcctacattcatacgcattgctgatggattctcatcaatggcccctacttctgggttggctgagatcaataaatcttagcagtttataaatggaagaaatggctttacatatcttgtttcctgaatccctttggatattttaaaagaggtgattaaagtaaatttatgtttctgcagatgcatgtaaagctaattgttttaataacagtataattggcgaaaggaagttatgtgtaataagaaacaaagcgtaccacttccaaaatattcacattagrcatttgttaaatttgcagtgagtttcagcatacacacatacacaacacagaccatatgtgaacattaggaagattgatttgtttaaaaaatccacttctacaccacataagtaatatttcttactgagagtcactgaagtgaggaagaaaaataaccacataaygggaaaagaaaaacattaaatttagttatattgtatatgttttgtgtttattagtttttattaattgtaggcatgcaggtaaaaaaatcgcctcatttgaaaattaataacccagggcacaaactattaattaaggcatatagcaaatgccttttaaaagtattttatactggctgggcatggtggctccgcctgtaatcccagcactttagaaggccgaggcaggcaatcatgaggtcaagagatggagaccatcctggctaacatggtgaaaccccttctctactaaaaatacaaaaactagccgggtgtggtggcgggcacctgtagtcccagctactcgggaggctgaggcaggagaatggcatgaacccgggaggcgcagcttgcagtgagcggagatcgcaccactgcactccatcctgggtgacagagggagactccatctcaaaaaaaaaaaaaagtattttatacttaagtttttctagctgctagtttaagagagatgagaatacattcaaagagcagggaaaggagagtgtctgaacagaggaatttctaaaaatgagtacagtattaacacagttatccttacaatagcctgaggtcaggactattgttttctccacattttggatgaagggactgagacacagagaagttaagtaacttgtataagatagagaagagacagacatgaaactgttataaaaaggaaagagacaggaaaagaggagaggagagagaaagaacaaagcttggatggcaagttaacttaggtcatctacctttgaaattcaagtagtctgtaacttttgccattacatttagaggcaccctctgtgacacggtcatagaatactggttcactcttaggcattcaacaaatgcctattgagtgtcagtcatttattcaacaaacatttactgaatgtctaattaagtagcagatatagtgctagttacttgagctacattgcggagacagggcctctttgaagagcttgtgcttcctctccatgaatgctagattcatgctttccacctaaaccctacttttggaaatcaagaaaagttcacctccttcatgagacttcttggattaaccccatagtctattttcacctagaaatagaaccctgtttttgagtcatgcacgttgccagctgggataaaaggctacatttcctagtcttatacctaggtgaacccatgggtctcaggtcaatgggatgtaaataggatttgtatgagaattctgggacatcctccaagagagcagattcagctggcaggaaaggaatttgctttctgatatggtttggctgtgtccccacccaaatctctacttgaactgtagctcccgtaattgcaggagggacctggcaggaggtaattgaatcatgggggtgggtctttcctgtgctgttctcgtgatagtaaataagtctcaaaagatctgatggttttgcaaaggggagttcccctacacatgctccctctttcctgtcgccatgtaagacatgcctttgctcctccttcgtcttccgccataattgtgaggcctccccagccatgtggaattgtgagtccattaatactcttttctttataaattaccaagtcttgggtatgtcttaattagcagcatgagaatggactaatacactttactacctatcctcctcctggcctggaataacatcactgggtgggtggagtttcagtcactgtcccaggacaggaggtggcctggagaatggaggccagtgcttaggtgtggagtagaagaatataaggggcttgcatccctgatgacctgaaggtcccatttcagccctcaaatagcctctttctggatttatttcatttgagagagaagcagttacatgaagtttgttactttgtttgagagataaatgcagttatattaggtttgttaattttgttttgtttttgttttagttgtatgatgctaaatccaattctaattgatatacctccttcataagataattttataaacccctggaaggaagattgttcattgggctttggcaggcagtgaccttaaaactaggaaaaactgagctttaagggcccatgaaagtccttggcttgtgggtttgctggctctttgctagaattatattttgtttttttctggttcagggtaccgtaacagaaggtgggaagctatatttttcatgaaactgattgcttttctaattaacaatcttgctaataaagcaccactgtacagcagatatagtgtttttaatgtcatggatattgtacctgaaagtaagtgaagaagtgtcagatagtttctgccaatatttgagcagtcttagttctaactgctacaattatgcaaggtatttgtcttagaagagcaatggccatttgagtaagactttccatatggtgttccacagtcactgggagaaaatgggcctttttttttccttagtgaggtgatcctctccttctttctctacaaagtaatgtggagtttggaatgaattctaatgagtgaataataggaagattttgcatactcatttggacaagataaacacaacagcatggttaaaattcttgagatgaaaggctgagtttctgtagcttgaattttagatgataaatatcaagaatctatttgaaggtcagctatcacaaatataatttttctctggcaacacttgggtagctttccttggcaaattttactcaaaaagaagataaattatttctgcctcaactttttcttttacctctcttcttctttctctttattcgattgtttgcctttgaaagtctggctttcattgcatcattagacagaattgtgtgaccattcccaaagagattgacagtgttcatggcaggctgtataggaatctttctgtgtgcaggctggtctacaatttagcataataaagatctggccttatattcataggatctagccaggaaaattagtcttacctcagggtttaaagaaatgagggtgtgtcccagagggatctgtctgtggccagcaggaaatttaattttaaaaactgaagaatatacaatagttcaggcactgaataatttgagcctgcgaaggtgcttctgccacatatattatcatagtgttagtaaggccaggaaggtctgaagtttgtatgagttcacagatattttgaaagactcatgcaggtatttttgatatgattccattttaaaatcacattgtctgtgatgtgtatttatggcattatctaccacatgtgtttgtcctgtagaatttacattacaaaaccttctctgatcaataattgacgatgagtgactgtagtagtttgggaaataacttgctttttactcttttgtcacctgcttcaatatagttcctgctgtttgatgagaattgactgagctggagcctgcaaaagtaactgtagtcaaattagttacattaaagggtcaaaattatagctgcgtggagctaaggtcatggcagaaccaaagagctctgggcacagatcttcctttcatgctcgactgggtccaataatcccccgaggctcaggtctctgattgcatttccagatggtctcctctggtgtaaacaccacccgcgctctgtccaacagcataagctaccctggcagaaagcaaaacagcaggtcagggagccctgggaattacacagtgggtggcacctgttgccaaattttgacctctctcatcccctacgttatatacccatgatattttcaacttacccctttcctttggtatttgcagggcaaactctctagtttcttagaataaagccagcttcatccactccccttcctaatctccatatattcttcaaactggtgcttagatttcctggctatcttgcagatgaattctaatatctactagtcagtagaatgcatttgtgtacttacacacttattattcaacaaatgcctattgagtgtcagtcatttattcaacaaacatttgctgaatgtctaattaagtagcagatacagtgctagttacttgagctacaatgcggagacagggcctctttgaagagcttgtgtttcctctccatgaatgctagtctcatgctttccacgtaaaccctgcttttgggaatcaagaaaagttcacctccttcatgagacttcttggattaacctctctcagatctgagcaggttgtccttctagaattgtcttaatgcatacatttgcagtcccttgtaaccttgttagactgcttctttcatgtagatgttttaaatttttcatagtgtgttgtgtacttgttcaaacgcaaactccccaagagagattcacttctggcaccttcatttttgcttttcatttcccctaatacattgctggacacttaattggtgttcaataaacatggtgaattcatttaacaaaagttattttgcacctaccatgctcacggctacaaatggacagcattatcacagcaactggacattacatagcatgcggaatggcagatggacagaccatatctataatatacttgggtaaaattttgaatgtttattagaatttcatccactgtctcatgtcttatagctacaagttaatttccaaatttgaatatgtccatacttgtttattaaaaagctggggacgatactctgtgagggtttctaaggagcatttgataaggtgtaaaaccactatagtcttggattcttctcattgctgagcagaatgggatgtgtcctgcagcaggttgagtggctctatgtggttttatgaccatacgtaggaacctgcttcttctcttgaaatggctgttttgttttatggagattggctagactggcaggtgacaaggcaagaggtgggctggccacgagagccagctgagcagtgcgagttggtgtgattcagccatttgtcaccaccatattctgccatagatagatattttctattcgagaaagtggatcaamtttcactgtacaccactttctcactakgstagaaatacatgaatggtggggcatagttcactccaaatmtgatccatctaaacttttctttctggtgagttgatctgttttgagattttacactttacataaaaatagtatagcagccactctttgccagtcacaaaccacctttagctgagagtattatcatatcaattgtttcaaggaaatgacaaatgagtagttaccaaaaaaagaatgaatgaatgaataaataaataaacacaagggaatgagttgttactagacagagaagaaaaagattgcttggcatgtcccaatttggttattgaaaatttttatttttgatgcagtgctcttcttttttccttccttccttccttccttccttccttccttccttccttccttccttccttccttccctccttccctccttccctccttccctccttctttccttctgtaacttaacacctatttgattttttgaaaacattttttattagatgcttagatcagctgggacaacttaaattgcaagctaccagaaatatcatattaaactaaccagtgaagatgacagtttggatcatggaggtagggttgatttcagctgaggtttgctttagcagttgcaacactgtgatcaagatctgccttctctccctccatttcaatctagtttcctggccttggctctattctcagcaggtcttgtcttcctgttcctaaattggccatgagcatctcattccttattctaatccaacagggattatacctgttggtatacctactcctcctacttcctcccttagtctgtgggggaaaaaaaaaagaaagaaaagaaaagaacttctgagcttcaatgtgattaggtcatatgcctatcactgaactgatccctgtggatagtgatgggattttgctgataagtctcagtctcagcccccttccccaataccaccatccactttaaaggttttggtttaaataaatttcccttgaaaaattttttgggggggattggatgcctaaatgacaaatttggtgtcctttcccaggaaaagggaaattttttccaggccgtcaaaaactaattaaatgtcctctctaaggtttcattactaagatagcacacagtttgctgctgctcctcctctttcttcttttttttttttgagacagagtctcactctatcacccaggctggagtgcagtggcatgatcttggcttactgcaacatccgcctcctgagttcaagtgattctcctgcctcaccctcctgagcagctggtattacaggcacacaccaccatgcccggctaattttttttgtttttagtaaagagggggtttcaccatgttggccaggctggtcttcaacttttggcctcaagtgatctgcccccgttggcctcccaaagtgctgggattacaaatgtgagccaccgtgcccagcccacattcttcttaaagggtttgagattttttttggaaattacagggcatatagctttgtgctttattcaaaatgtcatagagcttcaaacagttcttcctgagacagatgtaaaacaattttaagatttctgagaagtaatttatatatccttataatagtcataccatgtgaaacctggcctgctaataataagaagaaacatctggaactagtgacagggtcaattttgggtattctctctctatggagaggactagttcttctgagattgatgttggcagtttggaatcttttcccagtgggaaggaagacttagaagaggatagttgatattgcctctcctcccacaagcaagtttcatctttatcacagttccctatggctatgccattttgagatttgtatacaaaccctgtacattagtgagggactcactcagagaccacctagactccaatcagtatccagcctttaggagatggcttgacctgggcagcttccccagtgatggagtttacaaaggatgacaatgaccatattttaaatctgttgttactctcttgcaagactcctctttttctcttgcttgctcttcaccttagcacgtctgtacacacctgcctttggtataacttgaaagacagccctaattgaggcattcatctcatacaatccaagagtcaggaacacagcttttgtaaggaatgcattgtggattcttcagatgtgatttaatgaatatccaactgtacttggggactaaaaagagcatttttaaatgagattttgctctgaattggaaagtaagttgaggtgggaaataagccagccattaaatgctctagttttttttttttttttttcttgagatggggtctcagtctcactctgttgcccaggctggagtgcagcagcatgatcatggctcactgcaacctccaactccccatgctcaggtgatcctcccacgtcagcctcccgagtagctggaactacaggcatgtgccactatgcccagtaaatttttcataatttgtagagacagagtttcgccatgttgtccaggctggtctcaaactcctggactcaagcagtctgcccaccaaagcctcccaaagtgctgggattacaggcatgagccatcgtgcccaaccatagattttttttttcataatggcagagaatggctgcaatttagggtctttcttargttcttcctcatccatttcttgcagaaaatttagtactttgtatttctttcaataatttcaacaattttatcctgacttttcccagagcaaaaattaggatggggatgttagagcttcctttgagcaggctatcatcgcaatgaaatcttgaccttgccccttgtagttgcctattgctttataaaacttgttattgaaattgcaaacagtccaaattatatagtagtttctaatgtactttatcagggtgtcagtttttcttttgcaagtgttttgaggagatcagattgttaatgaacattctttgagaatctgaacctgagaactgtctctttaggatgaagttaccaaggacagatgcaaaatttgcaaagatacggtgttccagcctcctccaacaaaggttaacaaccacccgagaaccccagtgccacttacctaccacctcttacctttggaagcagattgcccagtgacggataagtgtggaaactgttcaaagattgggaaagaaaattgttagaaaaggcacatagagaagagtgggattgggggcaaaaggagaaggaggatagtcttctgtgtttttttgattggttaacttaaaatctcagctatttgtttacacaaaggctatgttgatgtccatattcaacagatacaggtatttggctcagaaaagcacatggttcccagaccatttgccaaatgtcctatccttgttcagctttggttattatgaatatccttctggaagcaactgacacctaacatgtctgaatcctctggacctgtagagttcttaccccggagtgattacaatttctgaaaagaacatccctgcaaaattagctttcaaaatacgtgcagataagcccatagaactgggaattcctccagggaattatatcctaagtagcctactacaatgcttgattccttgggcaccagtggttgctcaataggttttttaataataaaaactagaaggaaagaactattgttagctaaagttaccatgtaataattggcttgggtatgtccctgcttgtttgaattgcttaatgtctgttctttgcacagcagaaactcttgtgccacttcctgattagtcatcttggtcttctgtttcctgagctgtgctccatgatctcgtgtaaatatatacaatttgtgataaaatcatcttgctcattccatagcaggtataagtgggttaattctattgggaaacaagctcaaattttaacagaagtttttctttgcttcaagggaacgagtttcccaacagtgggaattttaagcattttggcaaatcaataggggagatattttcaaaccagcatgattctatttggctcaggtaaaagtaagcccttctggactggcttgcaggtgggttcttgagtcttggcttatttaaaaagctgctgcctgttcttaataaatgccatgatatgaggcaccatgaacaagctggatttaaacctgccctatcaataattttactcataagttcttggcaagtatgtttgttgtctgctgtctgcctgtcaaggttgtcagttagctaagcatcagccaaccacatgatgctgagtccccatgattaatctgacttggtaatactgttcatctatgtaaagaattggaaaaagtagatctcccttcatggcgttgtgcgcgcacgcgcgcacacacacacacacacacacacacgcacaccaatttgtttaaaataaaaaaagattagacgaaagcataaaatcagccctctggtctgaagcaattaatctgtagaagatgctacatatgctgggtgtagtggctaatgcctgtaatctcagcagtttgggaagctgaggtggcaggatcacttgagctcaggagttcaagaccagcctgggcatcaacacaagaccttgtctctactaaaataattttctaagaatagctggatatggtggtgtatgcctgcagtccctgctgctctggaggctgaggtgagaggattgcttgagcccaggagactgaagcttcagtaggctatgatcacatcactacactccagtctgtgtaacaraatgagatcctgtctcaaaaaatttaaaaaataaaatgaaaaagaagatgctacgtacattatacacatataaattagtaaccaaatggtttaacaacctcagtgattgtgttgttctgtagtttgatgacttttatcttgctccttctcattgccattgattgtaccaggttatttcctggagcatgttgtatatcaaggtttatgcaactgtacatttaacctttcagtgcctagctttccccttttcctatagaatcacaagaatttgaaggcaacacaatatgttttctatcttatagtctgaagttaatgcatattaatggcatgctgctattactagttaatactgatgccatgaggattagataatcattgtaaaaaatgtttaatagagcattttttacaatacttagtggatgccagtatactaaatcctttatatatgcttaggtcttttatttcccacaaatctgtgaactaggaattatgaacgcattttacaaaacaggactcgttgcataacttgccaagtcacacagctaatgaacaggagagtcagaacttgaactcagggttgcctgcctctaaagtcctccactaattctcattcattctgtaaaaatagaacatggcctctagaatctcgtcatttagaaaagaacagccttttggagattggttagctggtttgagaacatgtagtttgtttatctgtgtctttgactagtaataacgttcagcctcattaaatctagtaagctaaaaggaagcaggaaatggctgtagtatagacgcttgatatttcagcgatgataatgatggataataatgtgatttcacagcttgggttatcagacccaggtgagtggataagtggattcagattcattaaaatcaccgggcctagtttgtggccttcctttcacaaaccccttaggctgcatattaccctttaatagcatatttttcccattatagttgcccttgctattcatttcaaccacattacaagtataaacatgtacaagggagaggacagatgtccttcccttctgtattaactctcttgttgtatgaaataatgttatgtattaaattattgtctcagtttatagagtctgctagactgtgctgttcagtagaactttttgggatgatggaaatgttcaatgtctgtactgttcactaaggtagcaactagttacctgtgttagttgagcgagcacttgagatatggatgatgaaactaaagaacagatgtttaagtttatttaacccatctaaatttaaatgtaaatacccacatggctggtggctaccttattggacagcagagatttagaatagtaaagctgaatggaccttagagtacatgtaaggcaacacattctttttattttagaggaatgtaggactcagagcatgaaaaggagtaaaaccaagcctaggatcctggtctcttgacttctagttcataatttcttccactaaacttaaaattgttaaaaatgttactttgaactttagtatttgaagattatcgtggtaagactttgcttatatttacaaaagcattgtaacagaaaataaattttgaattacaactgtgactttatcatatttattttacattttatgattgctaaataggtcatatattgacgtctttacatatttgttgggagcaaaagagttgaaagtaaagttttcttcccatctatgttatttagccattgattcccctctccaaagggatcagtaatagtttctttgtgtatctttttaaacattcagatatattaagtatttaaaactgtgtattgttctctcatctttttaaacaactggtaggatatgtacactacacattcatatttttgcattaaacttatatgtggagatcttttgatgtgagtacacaaaaagggtactttaaaacagatacataagcttctattgcacgtaccaactgtagtttaatgcatccctatcgatgaatatttacttcctttccaaagttttctcttaaaagtaatgctgtagagaataactttggacacataactttcatgtgtgcaaatacattataagataattcctagaaatgaatgcactaggtcaaatagtatatacacattttaaattttgataaatattataaattgctctccatagagtcacagcattttatattctcactgacaatctgtaatctctatgccttcatcaacctagtgtgttaccaaactgatcaattcataccattctgacaggtggaataaaatctcagtgtagtttaaatgtacatttttaaaaattgtgaatgagctgggcatcttacatatatgtaagggccatttgtattttatttattgtgaaatatgtttgtatgctttgtccatttccatcagtttttaaaattgacttagaggagcttttatatataagacaaaatatgacatatatggtaaacaaaatgcaaacattttcttcagttgtttgcctttttcactttgtttttcatggtgtttgctatggagaaaatataaatttttacataaacagatatgccaatctttccttttatagcttctggttttttgagtcaaaaattgagagaccttcctcattctgagagtataaaatagtaattatttttaattttaattaatttatttttattgacacctaataattttgcatgtttatggtttaccatgtgatgtcctaatacatgtacatattgtgaaatratcaaatcatggtaattagcatatcaatcaccttaaacatttatcattcctttgttgtgagaacatccaaaattctctcttctggctgcttgttggcagtagtcaccttactgttcaacagagtactagaacttattcctttctatgtaactatatctgctgaccaacctcttcccatctcccactccctcctattctccctagtctctggtaactactgtcctactttcaacttctatgagatcagtttttctagattctacatgagtgagatcatgttgtatttttctttccatgactggtttatttcatttatcataatgtcctctagcctcattcacattgttgcaaatggcaggattttatcctttttgtggctgaatagtattccattgtgtatatgtactgtgttttctttatccattcatcccctgatggacacttaggtggattctgtatttcactattgaaaatactgctgcaataacatgagcrtgcagatgtctcttctatatactgatttcctttcctttggatatatacccagtaatgggattgctggttcatatatttttaacattttgaggagcttccatactgttttccacaatggtagtactgatttacattcccacgagcagtgtataggagttccctttcctttacatcctcgccagcataataacgattttaatatatttggaatttattctaaagatgtaaagtatgactcagacatcatttattaagcaatccatctttttcccagttatttgagatcccacctttatcacataaaaattttaatatatctttgagtcaacatctcactttgtagtctcttccatggaatctgcctattcttgcctgtaccacctgttttaattattttagattttatagtgtactttaatatattgaagaactattctctcattgctgcatttcttttttaggctgttcttcaccactgttacttgtttatattttgtatgaaatttagattcagcttgtctatttcaaaaacaatttctgttggtatttttagtaggatcatattaaagttcaagattgatttagagactttcgaaaagcattgaatctttctatctgggaacatgatatgcctttccatttgtttaagcattcttttatgttttctgtcagtgtttaatggttttcctccaataacttttaccatctataatttagcttattcctacattgttcttttttatgtcttcaaaatgggccttttgcatgtatgcatcaaagctattgacttgtattgattaacttgggcctcttctaaattttttcactttagaaaaaaaatattttagcaattggttattttatgttttccaaagacctaaatataaatgtacaggtgatgaactgcactttttcctttgaaatttgtatgcctttactttctttctctgatataattgtattcactatttcctccagaactagttaaactagagtagaaatttttggcatttttttggttcctaatcaaagttggaaaaacagacttttcccttgaaatgtagtgctggcatttaggttgagatagaaatatttcattatatgtttttaatcaagaatggatttgaatttcatcaaatactgtttaaacatctatgataataatttgaggtctccataggtttattaatatcataaatgaactattttagccttataactttaaaagccttattcttttaaagttttattcattctcctcccattcttgttcactattcgttgcccattcttgttctatataaaaaccccagtggtccctgctgtgaattcaatgacatcttatttcttttccttaagtcagagcaaatgtgcacatcagaagagcaaagtgtcaagtaatgatagctggaaattgagccacaaataaacagaaaatattttcttcattgttatttgtgtgtatgcttgtgcttctttttttcaagggagtagaccactgttccacatgttccacagttgttttatggtggaatgctctagttatggaaaaggagaatggagtctagccgtataaagttactaaacctgcttggatatgagtcaagggtatcctttttgtgcccaaactagaaaacctttccccttctcatatttttgagcaaggtgttttatgttgcaaagtagcccactgtctcttttcaactgcataagcccaaataacattttatattccagtcagtcacaaaatgaaaacaggaaacgtctttgaagcaaggcaaaaatgtcagagtgtctaaaacatagaagtacttggtgaaacactttcagcgtcttagctctgcctctggctagtcatttccactcgctgggctcagtcaggtctttcattagtgaaacagaggtggctgagcacttcctgtgaaatcgcagggacaggattgtggccctctggagagggggccaggaggaaaaggaaccagacagctggttttcgggagccaccagatgggagcaaatttccaaggctgctgagaagaatggtctagaataacagaattgttttgtgaaggagccttcctaaaccaaatgttctgagcgtccccgcaagcagagcaaatgagcacatactgtgttcatggggaaaaggacaaatgactgtacaaatggagtaacaaacaatttacgaaaatgtatgtggcctaaatttagtatcaaggtgatgggcaaaatgacttacaccaatttgtgacggtcctgttgcaaattcaatgacaaagccagccagtctacctagtccatagtatccagcagatatatcagtggagatggcccgagtgcaggctgcttaaataagataaatcatctgtgaagaaggaaaaggtcaaatgtgctattctctgtctttttttttttttttttggtctgaattaaatggaaaccattacaatttcttccaagaaaataaaaatcagcacctacaataatgctgtctccttctgaccctgccaagtctgactgcattccacctggaccctgcctttgtctctcatgtttttatccaagaataagtaggctaccttgtagtaaacaggaaatcttactcttacctcgcactagttagttatgcgtggtacttgatccataatcttctgcccccatgtcatagaagataggtttttccaactctcagatggaaaatcactagtgcactacacacacacgcactcatgctcagaaatattttcacagatccatttttctctgtgtgacggaggttacataattatatcagtggatgtcctgcagtccagctggtatatgtagagcaactgcatgtttgtatcactctgttaggtgcagtgtaggacacaaataaagagagagaagggagagaacactgccgagtcattaggggcatgctttcagttcctatacagccaagtttttttttaggcttggcctatgcttttttcttagtttgggtttagtatgtattcattcattcatattgccatgtgtgttcaacaaatattttgggatgcctgctctgtgccagacattgtgctaggttagagggatgcaaagacaaattagaactccttttctcaaggagacttctggttattgtatttgtgataaagttttaaagttactatactttgcctgcctagaatgtagttggatctcaaaagaattactgagggttggaggtttgagtggcagaagagcaatgattgatgaaacagagttttgaaagatgagtggcctatttgtcatggaggtaggaatggggggtgggtgggcttctggagagacacagcagaagtgtagagaagaccatggtacttgtagggaacttctgtggtttagagtgagatggatcttgcaagagctcaggctggagactgagaaaatgctaagtcatggggggtcttacacaacattctagagaatttagactttcccctgtagacactgaggggccgtgaacagcatttgtacctctgcaagatttttctggcagagacatggaaaatggtttagaaggtgaagataaggagctcaattagtgggctatttaaagtgtgcaatccacagataaaaggcaaaaacaaaacctgaatcagaagagtataccagaaaagggtgccagcctattatatatggcaatttatgatttatttaacattgaaggaaaaaacaggccttcaaaaataataaaataagaaggtgctagctatttacccctataacttcaggtacaagaagaatatttttattttactgagctcctcaactgatttaaaaaattaatactcataccagattgtaaataattcaaggaatcatagccccttccttactttttttacatttgtaagatttaaagagtcatacacccagataacatcaggctgcagagttttagagaccaactccttcagtgatttttcaagatgagaatgttctccatgttctcctgcagaagcttctctgggagccccaatatgtacaagagacagaggtagaccactggctgtgccttccctcctcctcctccccattctactcagctctgaattgcagttgcatagtttgcaaacttaatgttgtcaaaccttgttattccataatgggggcatagttgtgcaaactggaagtgattgatttacccagggacagaagacttggttaatagtagaaaaggatccctaggttccctaattgttggacaattgctcttagcagttttggttaacctggtttttatctggcttctcagtagagatgattctttcataagatcacctgcacacaaccagctactcatatatttgcttatatgtgtcatatctgatttatgtacattttctgtagacaagcttgttttaggtcatgtacttattacttactaagtgtttgttttctccatacttggggatctaaattagtaagcaacaaactgacttggtgggttcaactcaataatatccaatgaagccatttcttcccattcctaaatcctaatttagctgtgggaagtttggatcaatggaaattaaactccatatatgccaacactatgggttgataacctcttccaagaatcattgcctgaccatcatgttccttctacctgaccactccttcctgcacttttatcacatattactctaagggatcatgtctaactttttgtcttcctcaattagactgagtatttcttgaggccaggaaatgcatcattttatccatagcatctaactcaatatctaatgtgtaataaactcttaatagaaatttacttaataactagatagatagtttaagatatgcccttgatgtagtcaagaagacaaaatgtatgggtacatttccttcttgtgtctggttcctctttctgcattgtcagggcaagttttaccctctaatttcttgtggaccagcagctgtcttaattgacagtcccaccaaaccctggatttcataggatgtcccagacaatgagaaatggcttgaagatagaaaattgtctgtgtcttaaaataatcttctataaattatgcgtattaacacagatatgtagcaaactataaaggttattttgctctgaagaggaattcagaattagaacttggatgtagcaggacacctctgttctcattgccataaagaaaaaaaaaacaccttttatattgaatttcagtgaaccttgcagccagcatctgtcccattaattttcatatacgagaacaatgtggcatgattactcaccagcaacagaagtagcagttttataaatcttatgttgtagtggctggaagggacagggttgtgctctcattgtttccatattctttgtgaaattcacctttgcagggggtggtttgctctttctcttccagatgtgcacagaaatatgccatgtcactaaacgtcatgtggcttaacatttctccaattttcagctaatctactgagaaagtagtaattttttctgactagtggtggcctacttctcctataaggctgtcttttacaatgagggaagttggcctcactttatttataaaggtgcacctaaggctggtgctttctggttctggggctgcttaatccaccctctgtttcatttgatcctatagagtttgggggagggctgaacaacagtttcattgacgtgattcagattcaatttgctaagaacctgattgtgtttatgacattaataagaaacactttaagccttttaatacgaatccccagtcactctgcttcttccctttctactgatgatactttgtgatctacatagtttaaactttcattacacaaggaaacttctactaccacttgatgtgtgtgtgaataggctatggggaaaaaaaggttcatttttgtttgagttttttacttttcataggtcattgtcaatgtggtaagtatgctctttagtgggatgatccaacactagggcttcatattcaatatcatttacagaaatagtaaatgtcaataacagctaatgttcattgagtgctaatcttccaggtactgttcaaagagttttacctattatcaactcaattctcccaacagccatatgatgttgttactgttattatagataaagccacttaggcacaaagagattaagcaactagttcattgttacagagttggaaatggaaagccaggtcctaacccaaatgctstgttgcgcacttctctgctgtctgcaggtgggatgagaggtgggtgctgagctgcctcctgtggtgctgttttgaaacctgcccatcccaaagctaagggagtatcgctgtgctaaagggttcagtcagcagccttgccagttcggaatcccctagaaccaccctccatgcatgtcatgggcagctctctgagatttctggtgcctcttactggcttgttaagttggcagatttttctccccatttgcttccttcattataaaattcccatttccattttgcctctaggtagaagctcatggaactcaaatgggaaatgatgatggtggattttcctgctgaaaagatgtacctcaaaaggaaaaaatagtgtatttaacatggagaaatgaaatcctccgaagggagcttcatgaactaaattacccagaatggccttactgtctgttgtcagcatttttctgctgcccctttgagcatcagtttactcactcatgtgtgggtcagctctactcatctgtgaaggtagataataaaacctacccccaaaaggttgcagtgaagattaagtgatgtcatatttttaaaaatgcctctgtaggctctggtacattccaatggcttggtgaatttttttttttccttttccttttccaaagggaattaaaaaaaaatgagagtgagttttgaggatcctagagcaagtaatcccagcactttgggaggatcatgaggtcagaagttcaagaccagcctggccaacatggtgaaaccacatctctactaacaatacaaaaattagctggatgtggtggcgggtgcctgtagtcccagctacttgggaggctgaggcaggagaatcattcaaacccgggaggcggaggttgcagtgagctgagatcacgccattgcactccagcctgggcgacagggtgagactccgtctcaaataaataaataaataaataaataaataaataaataaaacagcaaagcttctatgaattctccttttagcccttcatataagtctattcttcaggagccagtttatattttatggttagatacacatattaaattattggtatgtcagatatgattctattagtagtctccagggttcatagcttgttagggaaaatcctcctaaaaagaagttctttttgtctattcttcattaacttatttcacttgtaaagcattaaaatgggtcctctttacatattatgttgttttctaagggacaaatactagtggttattattacagttctttttttcatgtttggtacttcagtggttgattaactgtttcttaatcctgaaatgtggaggaggtttttgcaagtggttgtagcctggttttgaatgaaggtgaaaatgctctttttgttagctctagatcagcagaggtgaataagcatcatgaatttaggagactggcgtttttttttacataaaagttgctttgttgctaattagtagattagaattcctttaattgcattctgaccaaagacttttgggtgttcaggagggcaagttagcatgtgttgcatttgaatttatacatttgagacacattttcttactgaagctgatattcatgaagcagaaaagataaaaacttgtacatacctttttatttcttgattttaatgttgaagttctattctcagaatggattttataggcaacaatatgcacttaaatttatgatctgtttacgagacctcactgtattttgacagaggtcaaaataagggaaatcaatcttggttctcattccaaagagttttttttcctgatatcttaaaaaggctttattacattatgttgatatccatggcagagagttccaaagacatccccatgaaagggctataaatgtgaggtttgaaaccaaggcaagtcaagcagggtaagcaatcttttcacccaaggttttaaaataactgctgataagaccttctcacagattttcattcatttcttcctagttataggcaggaaattctgaaagcaggtgaattctaaaattaccttataacttgatttcagaatatagttacacaaagtgagaataactcgatgaggatgctgtttggatcttgagtactgtaagtcctgtggtttaattgacgagttgatggatttcttttatgcctaaattcaggctgaaaggcctaaaggccacacgaggcagtttatcacgagcgctattctccgtttttatattmtggttcattaccagccccttcctcagtacttctatttatataatgttgttctggtcaaggtttatactaaatctcttttaacttcaacatccaacaaatatttttaaggactaatgtgtgcaaaacattatgctaggtgtttcctaaggcttcaaataacttggatgccagttttggactgtaagtgctcacaggataatagaaaaatcttgtttgcaaataactggaacataatgtacaatggaatgtgtcataaggggagtgcacacaatgctgtaggaattccaatgaaattcaccctcatctttcattgtattccctgttatttacctctccttaaaagaaagaactataagaactctacatcttttagtggcgatttcctagatagaaaaataatgaatattaaacatgatgtgttaggattggtgaggctgaagaaattctatgcattttgtcatttagtgaatatgtattgactgcctgcctattcagtgtcaagcactataggtggtaatgtatcaagaggttcatgaactaataataaaggggcacctctgtatttcacaaatatttgctgaatgaatgaactcattatattttattctcctatgtgattcctagataagttctgctacctaaaggaaagcacttatggaatccaaggtttggaaagggcttgaaagatcacattaataggtttcccttttatttgcctttttgaatctcaatatggaataactttgacttatccatactaaattgcatctcattggtgttacacaatctttccagtttttcaagattatttttaacttatgccaacaacatattaaatatcctttccatctatgggacccattccattttctaagtttacctaagactttaaaagacattaagccatcagagccaaaaacagagtttctctacttccatgttgatattctccttaatctacacttccattcattcaataaatatttactttcagggtgttcggatgagctatgggttacatagtgatgaattcagcagacatagcttctgccctcatgaagcttacagcctacaactacagaggatggggctgttgaagcagctaaaaaaccctaccttttctactattgagcaataaaagaaatgtttttcttgaatttctgagatcatttcttgccagtctttgctcatgtcactacctggaataaactcccttttatcatattgggttatcaacatcttatacattcacaaaagaccacataaatgttaccagctgcaaaaatcttattcatgtctgtgaaatccattaacatgtggcaccacttgagttgggctcatcacttgctgatttctgctgtcattatttgtgaatgtctaatttcactgtaagctcatactgtcctttcaaacatgaatgaggcctttaacattgttgtatcaatccataacattgaacataataccctgtttgaggaggcatgactatagaccctttctgtccaataataaagatgttggtaagagtaaataaaaggtctcatttcttgataaactggttagaatcaaggaggtctgagcatgacactagggttcctaaatactttcattctagacacataaaacctctagaagattaaattcagacaattttaaactttagatacacattacaacacaaagaaatgcactattataaattttaatgggggaaggccggtaattcaggaaactgtcagatctgaataatgaaataccagatagttcttatctatttacatactctgtgatttctaacactctgaacaataatatttcagggttctaaatattggttagatttttaaagttttcgaaattatataactagatgactgctctcaaaattaggccggtattttggattacacagagtgcctaaaagtgcatttttcctcctgaaggggaaagccatgtgcctagccaatattttcattccctaaggatccatggaattatgatagcttaccctcatcagtcacccaggctcccattggtgtgaattgggcaatgctgtttacatagcaaatacacttccttttatacaagggtccacaacccctgggccatggaccagtatcagttcacggtgttaggaactgggtcacgcagcaggaggcgagctgcaggtgagtgagcaaagcttcttctgtacctacagccactctccattacttgcatcaccatctgagccctgcttcctgtcagatcagcagcagcagcaaattctcatagaagcatgaaccctattatgaactgcacatgcaagggatctaggttgcacattccttatgagaatctaattgctgatgatctgtcactgtctcccatcacccccagatgggaccaactagttgcaggaaaacaagctcagggctcccactgattctacattacggtgagttgtacaatcacttcattatatatcacaatgtaataataatataattgaagtgcataatatacataatgcacttaaatcatctccaaaccatcccccactgccaccctggagcatggaaaaattatcttccacgaaacagatccctatgccaaaaagttggggattgcagctttaatagactcagaggcatagtcttagagtgtaacaaatgcacaaaccttttcttttaaaacagactccagagggattgaagagagggaaccagtgataatctatatgcccatttcatggcagacatgctgctgtgtgctttccatgcattatatcattcakccaacaggcatctaaagaatatagagtcaagaacagttaagccattgccacaagatcacctagctagtaaatggctcaaactcagtgactcaaacccaggatttccaaccttaaataaggctctcactcccacaccgcacagctgcatatctgagtgtttatcagtgaattacattgatgtaaattcatttatgaaaatgtcaagatatcgtgagcactagtgcttttaggagagaatatttaactcatttcagacaacatatattaacttcatcaaaagtttgcctgttataaacctgtgactcactcttggtcaccatgatggtgcaacagctgtccactggacaaatactaaataatattttatccttgccccctatttcttatgagaaagccacaatgaacttccttttgtctctcatttcacccttaaagggacaaatagcattgcattatccttgaaagggtcttctgctgacccatctttgacgcttccatcacagggtgacgatgggatgtttgctgtatcacacttccctgtgctttcatgaatgtgttactggtgatgaagaatgccaattctttgtttagtagcagtttgctgggtctccctgaaaataatgtgtcagttaggctacctataaatctgagtcagtaatgtacttctctaaggtatatttatgttttgaatttgtctctgagcaatctgttggggggaaattttgctttaatatgttttataaaaaggtgagaaagtaataaagtgtaatgaagataagataaattttctaataaaataaaatatagaagtgttcaaaatttttgctttccccatatgactttgttttttccccaaatgttaccctcataacaggtgggttctgtctcttgatgggtatcaacacagtgaccacaaccgaggaggatttagcaagggaatcttactacttgtaacaaataagggaaacaccaggagcaattcccaaagcagtatctctccaagctggggggcagtcagattttataagtgtagggtaataaggtgtgatctgattggattctgcaatgaggtgttgtcagaaggcataatctgactggattttgccatgggatgatggcagagctcaatctgtttggatcctggatcctgccattgttgtgtctgcttttaattcagtccctactccttggtcagagcacttaggttccccctgtggttgcactcttggttcttccgcacatggtcaggttatgtgacctgagggtccatggcaactgaaaaacaagaggaactttgttacataaaaaattgaaccagatttgcctggcatggctacacaaatggatgtctctgttcagccttatttatccacagtttttcctcctgctgatccctttttcttgcctgtcctccctgcctgctcacttgctttctggcctctcttgcctctcttcttagccagagctgtatagggatttagttcagtgtttcctccttcattgtcattggacaatattcactcatcagctccaggtcacctccctgtcctcacctgtgaccagtcttccttccaggttcattgccattttcaaagtgagtctgcactctctcaccacccgtttgcttatcacccactctctatgtgattacttgtgatttgacatctgcccatgctactacaatgaaatggctttctcagagactatcatatgtctctattgacaaaaccggattagtgctgcttattttctgcagtatttactgttgttggacaccgcttccttcaactttctcctctcttggttccagggcactatactaactttggtggccatatactcagtgcctccttatacatgagtggaagtaaggggttcagaatgaaatgattcagtcagtctcataaagagataggacatctgtggagattaaagttctcagagttagtagtctcattgctttattccacatgatgttgacaaagaagtagaaagggaaagccaaatccttcaatctatattgctaattaaaaaatgattttcttttcttctttttagtaaatgtttgatggtgtcttgggagtagccttagtagcaaaaggaaatatttatgcatgtctttgggaaaatgtctttccattttctgtggttattgtatctgtaaaaattggacaccatttcttaaaaggattatgtgaaaattttatgatgcctggttggtgaaaggcagagtgtcctgaaatatctaaaatgtagaatcatattctttctattgttttgatataattagaagtgtcgattttaaaattacactgaaaggcattttatttttaacattgttttattaggtgagtgcaaaagtaattgcagtttttgcattgttgaaatttgccatttgatatgggaatacattcttatttttaattaattaatttattattattatactttaagttttagggtacatgtgcacaatgttcaggttagttacatatgtatacatgtgccatgctggtgcgctgcacccactaactcgtcatctagcattaggtatatctcccaatgccatccctcccccctccccccaccccacaacagtccccagagtgtgatgttccccttcctgtgtccatgtgttctcattgttcaattcccacctatgagtgagaatatgcagtgtctggttttttgttcttgcgatagtttactgagaatgatgatttccaatttcatccatgtccctacaaaggacatgaactcatccttttttatggctgcatagtattccatggtgtatatgtgccacattttcttaatccagtctatcattgttggacatttgggttggttccaagtctttgctattgtgaatagtgccgcaataaacatacgtgtgcatgtgtctttatagcagcatgatttacagtcctttgggtatatacccagtaatgggatggctgggtcaaatggtatttctagttctagatccctgaggaatcgccacaccaacttccacaatggttgaactagtttacagtcccaccaacagtgtaaaattgttcctatttctccacatcctctccagcacctgttgtttcctgactttttaatgattgccattctaactggtgtgagatggtatctcattgtggttttgatttgcatttctctgatggccagtgatggtgagcattttttcatgtgttttttggctgcataaatgtcttcttttgagaagtgtctgttcacgtcctacgcccacttcttgatggggttgtttgtttttttcttgtaaatttgtttgagttcattgtagattctggatattagccctatgtcagatgagtaggttgcaaaaattttctcccattttgtaggttgcctgttcactctgatggtagtttcttttgctgtgcagaagctctttagtttaattagatcccatttgtcaattttggcttttgttgccattgcttttggtgttttagacatgaagtccttgcccatgcctatgtcctgaatggtaatgcctaggttttcttctagggttttcatggctttaggtctaacatttaagtctttaatccatcttggattgatttttgtataaggtgtaaggaagggatccagtttcagctttctacatatggctagccagttttcccagcaccatttattaaatagagaatcctttccccattgcttgtttttcctcaggtttgtcaaagatcagatagttgtagatatgtggcgttatttctgagggctctgttctgttccattgatctatatctctgttttggtaccagtaccatgctgttttggttactgtagccttgtagtatagtttgaagtcaggtagtgtgatgcctccagctttgttcttttggctcaggattgacttggcgatgcgggctcttttttggttccatatgaactttaaagtagtttttttcaattctgtgaagaaagtcattgatagcttgatggggatgtcattgaatctgtacattaccttaggcagtaaggtcattttcacgatattgattcttcctacccatgagcatggaatgttcttccatttgtttgtatcctcttttatttccttgagcagtggtttgtagttctccttgaataggtccttcacatcccttgtaagttggattcctaggtattttattctctttgaagcaattgtgaatgggagttcactcatgatttggctctctgtttgtctgttattggtgtataagaatgcttgtgatttttgtacattgattttgtatcctgagactttgctgaagttgcttatcagcttaaggagattttgggctgagacgatggggttttctagatatacaatcatgtcatctgcaaacagggacaatttgacttcctcttttcctaattgaataccctttatttccttctcctgcctaattgccctggccagaacttccaacactatgttgaatagtagtggtgagagagggcatccctgtcttgtgccagttttcaaagggaatgcttccagtttttgcccattcagtatgatattggctgtgggtttgtcatagatagctcttattattttgaaatatgtcccatcgatacctaatttgttgagagtttttagcatgaagagttgttgaattttgtcaaaggccttttctgcatctattgagataatcatgtggtatttgtctttggctctgtttttatgctggattacatttattgatttgcgtgtattgaaccagccttgcatcccagggatgaagcccacttgatcatggtggataagctttttgatgtgctgctggatttggtttgccagtattttattgaggatttttgcatcaatgttcatcaaggatattggtctaaaattctctttttttgttgtgtctctgcccggctttggtatcaggatgatgctggcctcataaaatgagttagagaggattccctctttttctattgattggaatagtttcagaaggaatggtaccagttcctccttgtacctctggtagaattcggctgtgaatccatctggtcctggactctttttggttggtaagctattgattactgccacaatttcagatcctgttattggtctactcagagattcaacttcttcctggtttagtcttgggagagtgtatgtgtccagaaatttatccatttcttctagatttctagtttatttgcgtagaggtgtttgtagtattctctgatggtagtttgtatttctgtgggatcggtggtgatatcccctttatcattttttattgtgtctatttgattcttctctctttttttctttattagtcttgctagcggtctatcaattttgttgatcctttcaaaaaaccagctcctggattcattaattttttgaagggttttttgtgtctctatttccttcagttcttctctgatcttagttatttcttgccttctgctagcttttgaatgtgtttgctcttgcttttctagttcctttaattgtgatgttagggtgttaattttggatctttcctcctttctcttgtgggcatttagtgctataaatttccctctacacactgctttgaatgcatcccagagattctggtatgttgtgtctttgttctcgttggtttcaaagaacatctttatttctgccttcgtttcgttatgtacccagtagtcattcaggagcaggttgttcagtttccatgtagctgagcggttttgagtgagattcttaatcctgagttctagtttgattgcactgtgatctgagagatagtttgttataatttctgttcttttacatttgctgaggagagctttacctccaagtatgtggtcaattttggaataggtgtggtgtggtgctgaaaaaaatgtatattctgttgatttggggtggagagttctgtagatgtctattaggtctgcttggtgcagagctgagttcaattcctgggtatccttgttgactttctgtctcgttgatctgtctaatgttaacagtggggtgttaaagtctcccattaacaatgtgtgggagtctaagtctctttgtaggtcactcaggacttgcattatgaatctgggggctcctgtattgggtgcatatatgtttaggatagttagctcttcttgttgaattgatccctttaccattatgtaatggccttctttgtctcttttgatctttgttggtttaaagtctgttttatcagagactaggattgcaacccctgcctttttttgtttcccatttgcttggtagatcttcctccatccttttattttgagcctatgtgtgtctctgcacgtgagatgggtttcctgaatacagcacactgatgggtcttgactttttatccagtttgccagtctgtgtcttttaattggagcatttagtccatttacatttaaagttaatattgttatgtgtgaatttgatcctgtccttatgatgttagctggttattttgctccttagttgatgcagtttcttcctagtatcgatggtctttacattttggcatgattttgcagcggctggtaccggttgttccttttcatgtttagcgcttccttcaggagctcttttagggcaggcctggtggtgacaaaatctctcagcatttgcttgtctgtaaagtgttttatttctccttcacttatgaagcttagtttggctggatatgaaattctgggttgaaaattcttttctttaagaatgttgaatattggcccccactctcttctggcttgtagagtttctgccgagagatctgctgttagtctgatgggcttccctttgagggtaacccgacctttctctctggctgcccttaacattttttccttcatttcaactttggtgaatctgacaattatgtgtcttggagttgctcttctggaggagtatctttgtggcgttctctgtatttcctgaatctgaatgttggcctgccttgctagattggggaagttctcctggataatatcctgcagagtattttccaacttggttccattctccccgtcactttcaggtacaccaatcagacatagatttggtcttttcacatagtcccatatttcttggaggctttgctcatttctttttattcttttttctctaaacttcccttcttgcttcatttcattcatttcatcttccatcgctgataccctttcttccagttgattgcattggctcttgaggcttctgcattcttcacgtagttctcgagccttggtttttagctccatcagctcctttaagcacttctctgtattggttattctagttatacattcttctaaatgtttttcaatgttttcaacttctttgcctttgatttgaatgtcctcccgtagctcggagtaatttgattgtctgaagccttcttctctcmgctcgtcaaagtcattctccatccagctttgttccgttgctggtgaggaactgcgttcctttggaggaggagagtcgctctgctttttagagtttccagtttttctgctctgttttttccccatctttgtggttttatctacttttggtctttgatgatggtgatgtacagatgggtttttggtgtggatgtcctttctgtttgttagttttccttctaacagacaggaccctcagctgcacttctgttggagtacccggccgtgtgaggtgtcagtctgcccctgctgggggatgcctcccagttaggctgctcgggggtcaggtgtcagggacccacttgaggaggcagtctgcccattctcagatctccagctgcgtgctgggagaaccactgctctcttcaaagctgtcagacagggacatttaagtctgcagaggtaactgctgtctttttgtttgtctgtgccctgcccccagaggtggagcctacagaggcaggcaggcctccttgagctgtggtgggctccacccagttccagcttcccccctgctttgtttacctaagcaagcctgggcaatggcgggcgcccctcccccagcctgctgccgccttgcagtttgatctcagactgctgtgctagcaatcagcaagactccgtgggtgtaggaccctctgagccaggtgcgggatataatctcctgatgcgctgttttttaagccggttggaaaagcgcagtattcakgtgggagtgacccgattttccaggtgccgtctgtcacccctttctttgactaggaaagggaactccctgaccccttgggcttcccgagtgaggcaatgcctcgccctgctttggctcgcgcagggtatgcgcacccactgacctgcgcccactgtctggcactccctagtgagatgaacccggtacctcagatggaaatgcagaaatcacccgtcttctgcgtcgctcacactgggagctgtagaccagagctgttcctattcggccatcttggcttcaagagcgggaatacattcttacatgtggttatgttatacatcattttaataggtatttctcacttgtttttgctaatgacttactacttgctgtttattttatttttattttagactatgaaagtgatgttagataaaaagcaaattcaagcaatttccttattgtagttcaaaatgggtcataaagcaatggaggcaactcacaacatcaacaacaaatttggcccaggaactaacgaacatacagtgtagtggtgattcaagaagttttgcaaaggagatgagagccttgaagatgaggagtgtagtggctggctcttggaagttgacaacaaccagttgagagcaatcttgaagcttatcctcttaaaactacaagtgaagggccaggcatggtggctcacgcctgtaatcccagcactttgggaggccgaggcgggcagatcatgaggtcaggagatcgagatcatcctggctaacacagtgaaaccctgtctgtactaaaaatataaaaaattagtcgggcatggtggcaggcgcctgtagtcccagctactcgggaggctgaggcaggagaatggcgtgaaactgggaggtggagcttgcaatgagctgagatggcgccactgcactccatcctgggcaacagagtgagactccgtctcaaaaaaaaaaaaacaagtgaagttgccgaagaactcaacgttgaccattctatgatcgttcgacatttgaagaaaattggaaaggtgaaaaagcttgataagtggatgcctcatgagctgagagaaaattaaaaaatcattattttgaagggtggttttctcttattctgtgcagcaacaacaacaaacaatttctcaatcagattgttacttgtgaggaaaagtggattttatatgacaactggtgatgaccagctcagtggttggaccaagaagaagctccaaagaacttcccaaagccaaacttacaccaaaaaaatgttcatggtcactgcttggtggtctgctgctggtctgatccactacagctttctgaatcctggctgaacaattacatctgggaaggatgttcagcaaatcagtgcgatgtagtgaaaactgcaacacctgcagccagcattgttcaacagaaggggctcaattctccaggacaacgcccgactgcatgttgcacaaccaacacttcagaagttgaatgcattgggttacgaagttttgcctcatttgccatattcacctgatctctcgcgaactgactcccacttcctcaagcatcttgataacttactgcagggaaaatgcttccacaaccagcaggatgcaggaaatactttccaggagttcatcaaatcctgaagtatagatttttatgctacagaaataaacaaacttatttctcattggcaaaaaagtgttgattgtaacggttcttattttgattaataaagatgtgtttgaccctagttataaaatgatttaaaattcatgatctaaaaccgcaattacttttgcatcaaccttaatatttgaaaattagtaaaattgcaaaaagaaagcccttattagctgttaataaatataaaatatataaaatgtgtgtgtgttaaactaagtgccttgagtatatgaagctatgaaaatgaagacaacagccttactaacattccatctcattattgttataactcctggttccatcataatcttgtttttccatcccaacagaatctgaggtgcagtcatttttgtgaagctgttattttcatcacaatgtgatctatacctaatgattacattacctgtacatctgaagctcgttcgtaaaccatcgtcccctgagagtatacctaacataggaaatactatatatatttggccgctgaagtgctataatgatgccctaaattacatatccctttctacagacataatttgctttattaaaaataacttctgcataactattgaagaataaaacagccacttatgcacaaggtgagggatatctgcatatctgagctagacaaaaagtatgtttgataatctattgtatgttttgctacaaaagcaaagtggttccttatgattggctgaaactctttgagttcttgttctatctttcagcaaatgaagatgctaattgtctttattctagccttttataacattaccttggctcttcaaagtcaaatggaacctggaaaatcgaacttaattccattttacatttttcccttgaccatttcccatggtggggaggtatgtgtctagatttggaaaataagcctgcttagttttttttcccagctcagtgcttagaaacaaccccctctagcaaaaccatgcctaggaaaacaaagtatccagctaggctttcaagrttacttgggggcaagacatggatagttacgtccttggaggaaaataaatacaaggcagtagatccaaatgtatttgtcatgcaaagaacattagctgagagagagcttccatatataggtttgcaaaactgagagcaaagccaaagccattcctgggttttgctttgtgatatagtctccaaatggatactattatgattaatctattctgagttccttaaatgctattgtaacaatgtcaggggccaagttcaagtctaaagtacgtgtatgatgatcatagctgctataatactcataatgctgaagacatagtaacaacaatttataataggagagcagttttgtgcagcaaaatagttccgtggagcagaattagatcatgaaaatgttgcatggtgggcatttagtcgtgaaagtataaatctgtacctaatgattgatgtgaatcaggtttcaaacctattagatgtgccatttaaccaggcaacatttgcccattatttttttgcatgaaaagtaattaccgtatgtttaatagttactgaattgtgactggcaggtgtgccccaccataataataatgatgacaataataatatcttcaacttcaactcactctccacaagtcagggcaaagagagaataaacaatgattatttggcgtgtttgaataatataaaagccagtctaggtaatttaaggcaaagatcactttcaaaagccagatttatatatttttccctcctccattcaaataattgtctcagagtcccatttcaacttattttaatagttacttcctgcatatctgtgatgggttctcaaaaactttcaaaaccactttcacatattccgttacttagcccttaacaacagtgtcgaatagggtaggagagaaacattgttccctgtttttcatttagaaagccgagattcagagaggttaaatgactgtttctactccacaaaaagaaagaaatcagttgaattttctctgataaacctgccaacgttagtgatacgaaagtgaccacaccgatagagtggtgtcactgtcaatattattctgttggcaaacatattgtatctggaagtcaagggcaagaaaagaaagttagaaattgctgagataagggctgtgctaccgaaaaaacactgaaagggtgccccagctagggtctcaaacctatacctctccccttcagcctggtacttcaatactgagtagattatggtgcccattttgagggaaggctagtgttatctcattcagattaagttttgtgttggtgtgacacagatgggtttatataattaatgtcatgtcctagagggctgtgaacattcctacacttgaggcagtgttcaaaatctattactgtttttttttaattaaaaaagaatttgttttctttttcccctagatggaacttaaactcattgtatatgattgaagaggaacaaggagaaggagaaggagagaaacaacatacaataaagttgtccaccaattgtcccaggaaaatttgtttctcacataggggtcatcacaactgctgcattgcagtcagctggaagtataatcttccatgaatctgaagatgtgatgaaagatagtaggcacaggcaaagcctagctttaagaaaaacataaaatgaggactttgagaccctagggcctctttccttcttcttccccttgataggcaaaggcttttttccaaatcatctttgtaagaagtcccagacccacaatgaactattgaaataccatgatccagtaatgtcatcttcttctgctattaatatggtaatcattttaggtgatagatttcaccttcaacagttcttgaagaacattcagacagttcaccctgaaatgggtgaaaaaaaatcaggtacctcctatttcataaggatgtgagccaggatgaagcagtatgttatcaggcttggcatttcgcaagctgagtagagtccatgtgatcaccaggtataatgttatgctggagttgggtttcatctcttgcttgggtttggaatgtaaacaatcttgaaattgtatttggagagaaggaaaccctgggaaatgtttatttttaaaaaacatggattttttacaaaagcaaatacatgttctaatttacatcagggagcagatacctctttacttttttgagatttttctgagacattaaccttaagttatcacttgtgtgtatcaggagaaaagttgggagagtgggagagatgggtaaggaaacatttttaaatgtacttaaatctcccatgatttatttcaagctgtaaagcatttctaaaactcgagtttgttaattatcccaaggaaaaagaagagaggaaaatagtcaatctgatagactggtgacattccatgtagcctgatactaagttgtgacaaaatatctaacattcggccattgtttttgatatttgtactttttcttgtaaactatttgctctgggacaaaaagtcattggttttgaacttgatttgggcaactaaatgatatacttaaccacctgctttagcccgaccatgactttttaatgacttccattttatttggttttggaaattgatttgccctttaaaaataatatcagcatttaaagtaattttgcttgttttttgtttgtgtagtagctaaatatgctaagagaatgacttcaaatatgcagcctttatgaagatgtgaaaattgctgtgctctagctacaaatggcaattccgataacaagagcttgaatgtggccttgaggcaagggaaaaacagaaaaagtccactgaaagtcaactttgtccccttaatttgcaggcactgtggggagcagggaatactccatgggcacaggcatcctcccgagccatattggttgtagtgttgtctattatatctgcacagttcctcctttgattctttctatgaatcatgtgttagcaacccaagtagctgccattagctccagccatatgggtgaaggtaggggtagaggttgcagagcttaaacataggtatccagaaatcattggctcttcccatttcctgactgattctccaactatcaatctgcttgtaagcacattcacaccactcagtgcccctggtacataaaacaagagcagtgactgaaataagctctcaaactagcaaactgaacaagctatacaagacttcttggatattgaaaatactaaacattctcatagctatagaattaattatttggaagatattggcaagtaccttttcatgtctacagtgtccatctattaaatgggaactactactctgaaagtagcagtaagttttattaggggaagggggagaatcatcacaatcatctaaaactgttttgtttaatgttacctgccaagatatgtgtctaagaggctgctgtggctcccaccagccctgacctctgcacatcactgaacctgtatcctactgttaatgatacatatgtcatatttacaaatgcctcatgtgtctcagggtggtaaaaatgtttctattcaagaatggcaactaaaaacacccataggtccatcatattggattaaccacttatatccagctacctgaaactactggcactactcagaaaataaattttcttttaccatcttgcccacttaccgttctcagaaagtcctgcctttcctttcccttctttatccaattaacccaacttttagctcttacatcaaatcttctggaaagccttctagacatttctctcccttcctctctgccattatttctttttcaggataggttagatattatactgggcgctctcatagcttcatgggcatacccatgtcaaagtagccagcaatcgctattctaagaaacttgtctgaatttgtaattggattgtaaatatcttgagtgcaagatcttcaacttgtatagttgtatttccaattttcaacatatgttgagtgaatgtattctaaatataatattaagcatggcctatacctggtaatataaacatggaaatagaatgattatttaatttgtcatgtctgtgaaggacccttgatggtatctagtcttaaccctcaacttacagttgaggaagctgaggaccatagtgtattcattcattttttgtttattaattcatgaattcattcatgcaacacattgcattgagcatccatgtgtgcttggcactgagctagccactgaccaggtaatgctaagtagagcagaacaaaagacatggtccttccctcatagagcttacctcttagtgcagtagagacacagtaatccaatcatcacacaagacatttatactcaccaactgtgctaactggggactatggcagccaactgatgtgaagatttggcttaatggcaggagtcaggaagcctttcctccaaggtgtggtgtttgaactgaaatctgaagaaccagcagaagagcacaaggagggaaaggagtttgccaggcccaggccagtgggtttgaagccttgaggcaggggggaatgaggtgcattcaagaaactgaaaggcggaaagtgcaggagcagaagaatgagggactcaagaagaaagaggcagtacaaaataagaatgaaagatggtcaggggccagttctgtaggacctgtagccatttaaaaatgtttagttattaacttagaacagtgagagcactgaaatgtgtgagggtcagaagaactgggaggtggcctgataacacatgcattttgaagaatctctgctgcagtgtagagagcagattggtggacaattgatggactgagcagataggtgagaggtagccctactgggaagaatatgctgaagtgtgtgcaagagattttggcagcctggagagtagagagcaccactgacctctctgttttttctaactttctcaaaaatgctacgttcacctacatcttatcaaagaaggcctttatttacctatacttctagcatgctttgctttagattttcccatttctcaggtaagggcacagaggctaacgaacgctcctttcctggggccaaagcgttttcagtttgggcatctcagtaacttttggcaccactgctggctttaaggagcctgttatgtagtctatggtggatctgaataccaggcagacagatgacatttttataaatagtgtgaggaaaccccagaagtaatgtgaatggatgagagttcaagaccactgctgacctggaaagccaatgactgaggcaccagaggaagtaggctctcagagggaagacagaacaccccctttccagctcattgagagtgaagcaggtgcttttctgaagcaggtgatattctgaagatccacctcctcagaacaagtgttctgaagtttctctgaaatgcagagaatctaccatatgatatggttttgctgtgttcccacccaagtctcatcttgaattgtacttcccataatctccatgtgtcatgggagagaccttgtaggaggtaatttcatcatggggggcagttacctccatgctgttcttgtgatagtgagtgagttatcatgacatctgatggttttttataacagggttttcctcctttgctcggcacttcttcctgccgccatgtgaagaaagatgtgtttgctcccccttctgccacaattgtaagtttcctgaggcctctctagccctgtggaactgtgagtcaattaaacctctttccattataaattacccagtctcaggtatttcttcatagtagcatgagagcagactaatacaccatctgtaagaaacttggaaaaatgatttgtttagagttccatctgagcagtcatattattagtaagatatatatgtcgggaaaagaaatttacttcttatgactttttacattttgagatcttattgtttgatgctccacgttgagggagccatatttctccacctggtcaccaggctcattaggagggacagatgtggcctcacatttcatgtgcggttcttgtctcagcccttctttttctcaaagattcctgccttttgtctacttttctcaaagtgccatcttccttctctcaggctcttttgggattacccaaccaccattgtaggcaactctagttctataggcaactctagttctataggtaactctagttcagtatcatgactttcatggtttctataaaaattgccatcccacagccttcttcacatctgtgacaggcagttgagaggggactgaggaaaagtattgcccatacatggaatttgtggagactcaatcaatgttacttggattgagtaataaaggaagttatttgtctaagtttgggcagcaagagaatggcagggacagaaccaaaagcagtttttaaacgataatctttttttatttttttactattaaatacagcttgggggcaaagaagagggatacaatttgttgactttcattgctacatttttggacaaggaaagagaaacagagactcaggactgtttagaagtccaaatgctatttatttccccatactacaatggctgttgaaaattctcctataatatgctacaaatacaagtgtattagagagtttattgtgtatatttttgaacatagtgtaatttcttgtatgatgttaatacagttcttgttcttattctctgtaagagcttgtgttgctgttatctctagataggagcaaacttcataaaatgtagaattccctctgcatgcatagggaagtagcttttaaaatattagcctattccattgtttagttataaagtaaaatgattttttaaagtgcaggataagtgaatttttatgtttcatttttagttattgaattgtctaggtaatgcattttaggagggcactgttcctcccagaacttaggaaagcagtcattcaatcactcagtaatttttagggatttttaaaatagatataacaattttaggatgtcaagttttagatgtctagttttaacttgtttggttgagctgacatttaagttcagtcccaatgtgatgtgaatggacctagccttttacctcttctttttttcctcttcattggaaaccagtacagagaacayggtcacttaataagaaagatgtttcctgctttgtttccttttattcaactcagaactgcctgggggaaaagattgcttcctttctgaatgtggtaagccacaaaatggaaaatgtgcacacgagctctttcctattaaccttggggaaaggtgacagaaatgtgtgaacaatgctgttagctgtttaaatgttcttttattattattaatttggtttaagggttttgcctaacaagtaactcccttgatttgtatgtttcagagttgtttaatttttctccaaaataacaatttgtccttttgaaattctttgttagatttatgtcattccagtttcaatcttggtgatgattcttctatctgtcatgagtggtttaatctgcatgtttataattatagcatataaagccacataattcaaggtgggtcttggtatataattcctttgtactttttgggaaaataaggctgtaatggaagtaataaagatacctgagttgggaatgtttaggtatcaccaaatattagctgttcagaaaaatatccatgataaattagaaactgaaatcagcacatttttctggtttcggttcttttggggaaacactgttattttttaattcctggcttaagaattgtatttgattatgcgaagacaaatccaaaattttaaattctaatccaagaccttagataaattagggaattagggaatctgtgtatgtattttataaccatatcaccatatattgacatacctatgtcactgaaggtatattgtaaaagataatttggccaactgtattggaccaactgctcttgaactctctaagtacaattggtttaagatattgcctgaaatgactattttgcttatggtgtcattctttcatggtcaagatgacagttctctaggaatgttatttcatttctagaatgtcagccaaacagctttttatgatcctgagcagttatactctwmcatcccaaacacacacacacacacatacatcttacacacacacacacacacacacacacacacacacacacacacacacaaataagccctgagaattttcagagaaattcatggtggaagatctgagattagaacccaggaactcctaagattccttggttttgtatcaaaggtcaataaagagacatgaagtcaatgaagtcaacaactgagggaaacatccctgaggaaatgcataatggaagtgctggtgtaactacctcaaataaatatttctactgaaactgatcagtcatccatttgatcaggtaaggcaggcaagcccacctctgattgcgtagtaattcactgatcattatcctgatttcagtggatctatgccatactcaagacctacatttgtcagtgacctgattgtcttattgccctacacagacatataatcagtccagcctgtgtgaaactccttgtgacccttatcatcatacttaagctgttttggtctttcaaatgtattcgctcttctttaccattttgaagccatcactctttcaccactgccagctagtcttagtaatctttcaccgtgcactgtctgttgcctcactgaatcctcacagtcattctatggcataggtaatatgattgtcattgacattatgttcataagggatccaaggttcagagggattgtattgttcagggttgcacagctaatttctagtaaagccaggaatcaacttgcgtctatatgattccatggtctatgcacttagctgtgatgtatgcgttctatctcaagtgatcacctctaaaatcaggatcagttcacagatatttgtgagtctctcaagagaactagggaaacttctgtaaagttagctaatggctttttaatgttatgtggtaattgtggtgaagcaattgtcaattccagttaaattagcttaaaatgataagagcaaacacatatctttgatgataaggctgggatagaggttaatgtctcatcaattttgggtctctcttagatgtttgaccttatcctaacaacttaagctttaggtaaagtctgcatttggtactctaatctcttcctatcagacacaggtgctcttctctgcccaactgcaattcagtccaagacatgccttctccagttagtctctggagaatgttgttcctacttagactcactgcatagatcttaacttgtactcctgctggtggtgtgcatatatgagctgtcacttgaccatgcagccacacctggagacccatttctaggttcagagtcatctctgatgcagcctgtaatttccccactagcatgccactctgtaggaatgaaccagacattgccacatcattctatgtagcattttcttaaaattagagcttcactataaacaatctttggtcaaggaaaggctttgttatctactccatggtctctttgagaaaaaaggcctggtcccattaagctcttgcctcgtttttgcctttcagggattattcgtgctctgtgttagatgtgaacttttggttaggtacataggaaatatctacctaagacacttgtgatttccaccaagtttgaaacagcaatctaaaagctaactcattcattaaatgatggaattgttaagttggtataaagtgatggtacaaaagcccatcagggcaggtttgaaatctaaatgcctttcagtatgcattgaacatgcgcatccatgagaaaatagtatgataaagaaagcagggtgtgaccttattggattcatatttccttatagaacctccaaattaagacaaatttccagacatttctaaaagcagcaatacaatcaagaaaacaaaacaatgagattcagtatgtagctactgcaaatttgtcagaaaataagtgggaaaataacaagatcctaggaaatctgttgtatggagctgaggaaaaggaatgagtttaggtttttctttaagttattgaagaaggcatgggattatcttctggttgctagtcttcccttagtttcaatgggaaacttatcagacacacttatcttgcagaagcaagataagaggacaaaagaatttggaagatcatggtggaattaaaaaaaaaggaatgtagtcagatggtaaatttagtctaattatatttagagatgggttaacataatcagaaggtaaggaacccaattatgagataggtgtgataacatagatggcttaataaaatacaaaatagaaagatataaatagaatgcttttatataaattctggaggagtttaaaaatgagtgagtgttcaagataacttagaaggaaagatattaatataaacttgaggtatgttggtcttgaagaaaaatgaaaaagctcattttgtgaaatgagtggaagaataccagctctttttcagattttcaccattttattaatattttttgattatagaattttaattatgtaggaaggaatttattaaaaagtaaacacaaaataaaaccaatcatatagttttggccaaattgttgcttttcttttacttcatttcctaaagggcatttctcagagtcacttgaaagtaaaacttgagagggttttatttttttgatttatttatttattttttttagtggctgtttgttgaaaaaccttgttgtaggctgctaggcattcttttactaagaatttcgaatgcacctcatgtgcaaaagactgcttaagtgtgtcactgcagaaactagcaggatttcaaaatcaaactcatcagttttctgtgataggatgatggtttgggagatactcaagaaaggagtacgtgttagtagctgaagatttttctgtcttcttccttgtgttgtcagatccacacttttattttccttttttttttttttgagacggagtctcactctgtcaccaggctccctgcaatttctacctcctgggttcaagtgagtctcctgcctcagcctcccgagtagctgggattacaggtacgtgccaccatgcccagccaatttttgtgtttttagtagagatggggtttcaccctgatggccaggatggtgttgatctcctgacctcgtgatccacccgccttggcctcccaaagtgctgggattacaggtgtgagctactgtgcccgtccttgttttccttttgtcaagaaagccagacattctgtgacacggtaaatgaaaaagggcttggacccaaccccagctctgttgcttgcttgttgcgttgccataagagaccctcaagaagaayctcacaaaatccactgccctcccttagtctcgctttcccactaaatcgctccatgcaaggggagccatttatattgcattaaacttttctcggtgttctctaattccaggggttcttactgcctgagagggtcactccaccatgtgggtaagcggggtgtccagagtctgcccataggccatcagcatcagtttttcaaatcctgggactttcactaaaaaactgtggttcttattttaaaaacaaaacaaaccaaaaaaactgcaaggaagcaaactccacaaaacccatcaaaaccccaaaattttcttaaccttaataacttgttctttttccatgcatatctaattcctccttttaaaaaatacctaaaaaattgaaattggtttaccacatattcctgttggcccacgacacataatgattaatattttttcctttataaaaaattgattgcttttactgtgacaactttgacaaagtctttcaaagagggagagaaatgtgaattcaaaaggataatgtggcttttattttttttactttgatcctgttttgtgaagcattacctaggttagtattgcctcatgttaatcagtgaccataaaggccattaggatgccttgatagatgcccttggtctcccttgactttgattgaagcatcttaaaggcctgtatgcatgtggcacaacatctaacattgtaattgctcactcagtagctctgagcacttactcttcaataaattcttagatgccgtggggatggcgaatgaactttttaattacatgtctgttgttttctatcaccaggaactaaattaatgggaaattagttcacaaggtttattatgcattttccctctttaagaggggactctttctgacagcccttccacttttatccttttaccatttttttttattggcctcagtactgaaattccttctttcttgttccaactacatcagaaacattcaatagacttagcagcctatgaaagtctgacaattacttcctcacggcagccttgtttcaagagtaggtccagaataaataaaagtttttcattttcctggtggcatctgttagttttcaacattgcccagagaaagagttactgtggaatacaaaaaaatgagctatttttttcttccttttggggagaaacagacatatagaaaaccatgagtgcttccttcataaatcatattttatgtgcaaccagtaagagagagagatgatgatggttgtggaaaagtcatagtggataacctcaatttattcagtcttctgagataatgtaagagtaaagcatggaaacaggaatacagagttcatcataattatagatcatccattcaaaacattttgaaaacagtgctatgtaaacttgggatgacaaataatgaagcatagttaacacttctcattggttgtgaattttcaaatacatccaagtatttaatcatggccattcatcattctgtaaatcaaaactaggtctttgaattctctccctttcctattctcagattaaggcatatttggtttcatataaaatcttatgcataattttgaatttcttgggccaatcaaataatggtacataatttaatttaaaaaacttttcagaaggagaaaactcatgtttcacatacttcttattaatcctaaggcctagcaaagggtacatacagctgtagttcacctcaattatacactgtaaatatttagattagagacacgaaataagttttgggagttgcaagaatagaatcagatgtaggaggtattcttgtagaatagagatggagatgggatttaaaattttttatttcactgctagagcaataaaatcagtattaaaaacaaggagaggctgggcacgatggctcatgcctgtaattgtagcactttgggaggctgatgtgggtggatcacgaggtcaggagttcgagaccagcctaaccaacatggtgaaaccccgtctctactaaaaatacaaaaattagccgggcgtggtggcgtgcgcctataatcccagcaacttgtgaggctgaggcaggagaatcgcttgaacctgggaggcggagattgcagtgagctgagatcagaccactgcactccagtctgggtgacacagcgagactccgtctgaaaaacaaaacaaaacaaaacaaaacaaggaggggcatgggcttggattttcataggaagagaggctgagaagaacaagaatgctgacatttgttttgtgaaatgggtctgaatgcctataaaagactagcaggtactcagacatgcctgtcaccacttggcagcaaagcaaggaaataggacagtattacatttgtgaagttgttgatcagaaaactagtgtgcagaggaatttgtgtgttttaaaatattcccaaagtggcagaatattactgacatttgaaacaatagcacagtctacctatgttaaaatggtatttccatttttaaattatattttttcaataaaagtcttgctctcttcttaagttacagatttttactttttcattttgcttgttcctgtgctccttgatccatcaatgaaaatgtgattttctgttggagtcttcgataaatatgtaaggctattttcattgcatcagaaagctgaaagggaccttggctgatcatttgtgtaattgaatcgtgtctgcgtttagggcacaattttcattttatgaaagaaacacaagatttcccatgatgttttgcatgtctacaaattcaggcgaatgagtctttcctcgggctcagtgagatcagtggggtcatgctagtgaattaactggcatgatatttgcttaacaaaagcatgccataaataagagacttaatagtcagttggcaagttgcttcatgctaatgctgtttttaaaatttaaagtaatggatgaaataaagttttatatacatgtctggatttttgaaaaataagaagatttgaggcatagtgtattatagcagaaatgtcttttaatttatttttagttgttttgggtacatggtaggtgtatatagccaaaaaccacaattacttttgcatcaacctaatatttacagggtacatgagatgtgttaatacaggcatgcaatgcattataatcacatcatggagaatgaggtctccatcccttcaaacatttttgctttgtattacaaacaattcaattatacatttttagttttttaaaaatacaattaaattattattgactatagtcacccagttgtgttatcaaatagtaggtcttatttgttctttatagctatttttttgtacccattgatcatccccaccttcccccaccccaaccctcccactatccttcccagcctctggtaactgtccttctatttccatgtcttttaaagtgtctccctcatttctgtgtacatgtgactcactggggaataaacagggaaatcctttgtgatgaatcagatgtcattctgagacacagagcttcttatacttttctttaaaatcatatttgcccttctagatcagtatcaagcaaataacaaccaagaatcaacatgcataaaaatgacaaggttatcccagagttctagttgtcattttcatagttgccagcacccttttccaggaaaacaaagagagtggccatctaagtgatgccgttgaggaagctgcctttcccctaatttctggagagcctagtgtagagggagaactcctgcctctgggaatatagcttttagggcatccctttatccattctccaccattccttcagtgaaggaaattataaaagcaaaactgggacccaaggcatgctttgagtctctttgcctcagcccgggcaactgtattctccgaattgagttcattaatattgtcttcttaggagaaatattatctttctccagactgggcagggagtctggcttgagaggcaacaataaagaaagaatatgtcttcctctataaagaaaggccactttataatgaatttcctttagatcacgaacagcactgtaagacccagactgtcaacttgtgcttttgaggttaggagctgagaaaactcttcttgattaataattgagacctaaacatggcaaaaaacaggtctgcctcagcacggagatcatgcatcgaggtggcgggcgatgccttcagtgggttctcttttcttcctgtctcctctgcgattatgtggcaagtttagagtcaactacaggaggagtttcagacaagaagcacagtttgatagaaactaatttctggattgtgattgtgtgagacctcctgggtgttcctgagactttcggaggatgattcttggccttgctttgtttttgttcttttcttctttaggttttcatctgaaggcaagtaactcatgtccctacaaggaaattcccctgaggaattagagataagcatgcatttctcaataaaacattttcagaaaaaaagttgctgtgtttccgggagaagcagatggctgctattgagagacacctaggtttgtgttctgggaatctgtctcctactcatgatagcagggggcagattcagatctgcaggaggtagaaataggcatcagatcactctgtcctaaaaaacaaacaaacaaacaaacaaacaaacaaacaaacaattggaagaaatgaattgatcacagaagcatctagagctaggaccaattaaaagtcagttagtttatatgacctatttgaagatttctcaacaatcttgacctattgcttaagagcacaacatttgtagtaaaatgagcctaagttaggatatgacttaagatcactgaccagctgtctaagcttgttagggttacccaatattgtgaaacttcagtttccccatttaaaaatatggaggcaataatagcaattacctaactggttattgcaagcattaaaggaggtcatcaatttctgtttgaggttggaaaatccttcaaaagctttctattcatttgagtaacaagcaaaacattctgatttaatatctgtatgtgcttcagtgtctttgattatcacatttagaatattcaatattttacttgtaatagtgaataaaaagtttgctggttgagagagtgaataaatgggtgaatggaagagtaaataatgactcttgtaacactattagttatggagtggatacacactagaccagtggggctgagaaaatttaaaaaatattcaagcagtagaaatttttacttaataaatattgcttgggaggctgaattaatgataaaaataaatgttttgcatttgacattatctacccaataattcacttctctctgcattctctcactctcttaaagaagggtaccacattgatgatgctaaatgattcttgtagaaccagccagaggtggaaaagaaagtagttctgacacttggttaaaaaatatacatatacataaataaagtcaaactccactgccatctctactcaaagtgtgtgcatactttcttaagtacacgctgagatgactcattttacacttctttttttacatatttaccctgttttaatgggttggggaatggcaagagcaaaggaaagaatagctgattaccattcaagacacacatccaaatcacataaagaaatctttagatctgagaataattgtgaaaagaataccaaattccagtgtagctttaaaaagtgcaccgttatctttaattacctgcttgatagaagaatatttattttggaataagaaggaataatttcaaagttgatggccttgttataaatataagcaaattaacttttttagaaagccatttcgaactccgaagacaccagcaacatttttattgattaattctttagtgttataacaagcaagttgtttttatgccgtatttatgagctggtatataatcacacatctcaggggtggagaggaccttaagaatcatccacttcaacagcttatttgaaatgtgtttgtttttatgttctgtatatattctgttcttttggttatctctctctctctgtctctgtgtctctctctccatgtatgtatgtgtgtgtgtgtgtatgaaatagataatatatataaattatcataaaagtatatttacatatatattttaatgcccactctattggacttgtaagaaaatcttacttctataaagtactctagaggcatatacttgtagcttattttgtgacatatgtttggtcatacatctaataacaaatctttgatcaggagcataattccaattagagcagtggttcttgacagcggcagtgttccatcctaggtattttatacatgtatcagaattttattttatcatctcaatgactagtaaaaggcaaggttgctgggtgccctgtgatgcatgtgacaatctttctcaaaaggaatcctcctgcttctcctaaaatatttgaatgacccactggattttgatgtaggttagagactgtttataatcatcggagcctagattttattttacttaaatcgcagagtactgtttttgctattttaatatgctgtaagttttcccagaaaacaacttgtataaattgacaaaacttattttgttcagaatttttccaggagatgctcaatatttcagaaaacgacctatctaaagrcaatagtgtttgtggcatttaagatagaaataaagtacaaaccgtcagtctgcatgcaaactgtagttactgtattctcacgattctaattatgggtgcaggcacccaggactttgctatgttttcaaatatagtttttttctattgctatatatggaaattcttataattttattctgaattaataaccttacatcttttttatgatatacttgggacattatattgatttttaaattttgtatacagataggttgtattatctataaatttcaaatcatagatgatgtaacttattatgtctatgataatgaaagaggcattaaattatgtacgagtgcaataaggagttgcgtttgatagggccaaaaagccctgaaataaaaaagcagtatactcaggggaatttgctacatcttctagtacaagtagaattatggggcaatatactatttatcgattgttatatagtaatatcgccacaaactgagtggcacacatttatcatcttagagtttctgtggttcaggagtctgagtatggtttagctgcaacatctgcaaggctacaatcaagatggtggccagagctgcagtctaatttgtaagattggctgggaaaggatctatttcatgagtcatgcagttcatgtaggaatcgaggtccttgaggcctgttggactacagacctcaacttgttgctgtctgctggataaaggcttcgcttacttcctcaccgtgcagctctcttcagtatggccacttacttcattgaagccacaaagggagaaagtctgaaatcaagacagaacatataatcttatgtaatgtcatcatgaaagtggcatcctgttggcggagcttgcagtgagccgagatcgcgctactgcactccagcctgggcgacagagcaagactccatctcaagaaaaaaaaaacaaacaaacaaaaaaaggaagtggcatcccattatctttgctgtattccattggtgacaagtaaggtatagattccacatgtactcaaggggcacgyattacacaagggatgaccactcacctgcaaggataattgaggaacattttcgattctgttcaacacagccaatttcctatagcagtgttaggtggaggggatgagttattgggatcagaaggtagctagtgtgttctgtagtctttattccaatgaaagataactttacccattaatgtgaagtcaattgtactcagagaagagggaaaactagattactagaatgtaatctgtttaagtcttgtaagactacaaagtccttactaatttgatgtgcatttctctgatgagcatttctgtagcactggagtccagtgatgcagggatgggttatccacattttctgccactcaagatctttccatccaggtgatccagctagttctcaggcccatcaaactttgatccagggtcagatctggaagaggtagagagcatttttttaattccttatttaaaaaatgtgatttttgtgggtcatgtgaaggtttgttataaagataaacacgtcatgggggtttgttgtacatattattacatcattgaggtattaagctcagtacctggtagttatcttttctgctccgcttccctcctcctaccstccaccctcaagtagacctgagtgtctgttgtttccttctttgtgttcctaagttcttatcatttacttccctcttataagtaagaacatgcagtatttggttttctgtttctgcattagtttgctaaggatgatggcctccagctccatccatattcccacaaaatatatgattgtgttcttttttatggatgcatactattccatggtgtatatgtaccacatgttctttatccagtctattattgatgggcatttaggttgattccatatctttgctattgtgaacaatgctgcaatgaacattggcatgtatgtgtcttttccggtgaggttgcagagaaaagagaacccttacacactattggtgggagtgtaaattagttcaaccattgtgggaagcagtatggcgattcctcaaagggctaaaagcagaactaccgtttgacccagcaatcccattactgagagcatttaagagtcaaatgtattcatgacataaatgtgtattgaaaatctgatatgttttagtgattgttttatagggagggggcagagactctgcttttatgaagcttacagtgagtgccagccaccattttagcttttgggggccttctctaagaagggtggagtagttaatgtagacaaacatgggttttggmagcatacgaccatgaattaacattatatttccgcttaccagccgtgtgattttagcttacgaaagctactctctggttgtttatttcttcaagtgaagaaatgggtctaatagtacctatcacacaagattttctgtgaagattttgtgagatcctrtatattaagcacccagtgcataggtgttctcaatgttaaatcccctctccatgtctgaaccttcaataaaacagactattacaaattacatatgaagactttgatgtttaacgtcatccacacaaagttaggcaaaagtcatatataacaaatatttaagtaatcacctggaacaagatctctttagttattttttaaatatgagatctcacaattattctcagcatttcctgttcattgttttgctatgggtagcatgtcctgattactcagttatacaaaatatttgaatggcttaaaggagtatttgtgtttgacagcataaataatattgtttttgaaaatgtatgaatacagatagaaatcaatggactggagtatatgcatttgtctatcttggattgatctagtgtattgagtcacaaaatttagttgatagaagggatagagtatgagaaacagagtcccacaactttgcatcaacttagaaaattattcttttatttaacattcattcattcattcatttattcaacatttttaagtttccgttccaggatcttgagtacagacatatgtggttttattgcactttgctttatcatgctttgcagatattgtgttttttacaaattgaagatttttgacaatcctatgtcaagcaagtctattggtgccattgttccaacagaatgtgctcactttttgtcacattttggtaattctgaaatatttcaaaagttattattaatctgttatggtgatctgtggtctttgatgttaatattgtaattgtttgggagcacaacaaaccatgcccatgtaggttgcaaacttagttggtaaatgttgtgtgtaatagttgctacaccaaccagctgttccccaatcactctccctctccttaggcctccctattccttgagacaaaataatactgaaattaggcaaattcacaaccctataatggcttctaactgttcaagtgtaaggaagagtcacacatctttcactttaaaccaaaacctagaaaggattgagcttaataaagaaggcatgtcaaaagctgagataggccaatagctaggcctcttgttccagttagccaagttgtgaatgcaaaggaaaagtccttgaagaaaactagaactactttagcgaatacacaaatgataagatagtgtgacattctaattgctgatatggagaaagttttagtagtctggataggagatcagccacaacattctcttaagccaaagctaactctcttcaattctatgaaagcttagaggtgaggaagctgcagaagaaaagttggaacctggcagaggttggttcatgaggtttaaggaaagaagccatcctcatagcataaaagtgcaaggtggtgcagcaaatactgatgtagaagctgcagcaagttatccagaagatctagctaagattattgatgaaggtggctacactaaacaagagattttcagtgttgacaaaagggttttcttttggaagaagatgccatcttggctttgaatagctggagagaataaggaaatgactgacttcaagggacaggctatcttgttaggggctaatgcagcaggtgaccttaagtcgaagcccatgctcatttaccattctgaaaatcttagggcccttaagaattatattaaatctatcctgcctgtgctttataaatagaacaactaagcctggatgccagcacatctgtttatagcatgatttactgaagattttaagtccactgttgagacttactgctcaaaaactaaaaaaaaaaaaaaaaaaaaaaaaaatactcttttaaaaatattactgctcattgacaatacacctggtcactcaagagctctgatggagatgtacaagaaggtgaacgttgttttcatgcctactaacacaacatccattctgtagctcctggaccaaggagcaatttcaacgtctaagtcttgttattgaagaaacacattttttaaggtgatagctgccatagatagtgattcctctggtgtatgtggacaaagttcattgaaaagcttctggagaggattcatcattgtagatgccgttaagaacactcatgattcaagggaggaggtcaaaatattaacatttacaggagttttgaagaagttgattccggtcctcacagatgactttgaggagttcaagacttcagtggagaaagtatttgcaggtgtgatggaaatagcaagaaaattagaattagatgtgatgcctgtggatgtgactggattgttgcaatctcatgctaaaacttgaatgattgaggaattgtttcttacagatgagcaaaataagttttcttgagatggaatctgctcctgatgaagatcctgtgaacattattgaaatgacaacaaaggatttagaacattacataaactgggtagataaagcagcaacagggtttgaaaggattgcctccaatttctcaagaaattttattgtgggtagcatgctatcaaagagcattatatgccacagagaaatattttataaaaggaagagttaaagcagcaaatttcattgttgtctttaaaaaaacaattagcacagccatctcagacttcagcaaccaccatcctgatcagtcagcagccatcaacatcaagggaagaccctccaccagcaaaaagattatgactttctgaagattcagatgatcattagcatttttagcaataatgtatttacaaattaaggtatgtacatttttcagatatgttattgcacacttaatagactacagtatagtacaacttttgtatgcactgggaaaccaaaaaattyaggtgacttgctttattatgatgttcactttattattcagttcactagaactgaacctgtaatatccctaaggtatgcctatgcttgaaaaatgttatcagtaagatgtgtaatgtgtgacaaatccagataatacattacttttggagaagctgagctgtttcaaaagtgttccttttatttgaagaagaagcagagtagcccaatcaagtaattttatttattttgaacttacacaataatttacgcttttgtttttcagcaagtagtaagggaggtgggttaatctgaaatgaaatgttcttagatcctgytgttcagttggttggagggcattaaagatagttattacttaagatctctgttgttttgaaattcccattttcctctgacctaaattctatgatgtaaaagaatcccagccaccacagatagactgtttttccttatttaaatgctttaaaatttagttttgacggaatggtctcttaatagaattcttgtgattctgtaacatcttagcatctttggttggcacttagaatattctcccacaggcatatttcatttgcctgtatgcttgtattcctcattagcttatttcctctggagagtgagactctgtttctgcatgtaacagttgatcagtaaatgttttgattattactatttagatcctgaacatgaacgggctcctattcctttcctattgctgcccccaatgaatttttacattcaaaaagtaatgacgtgttatcttggtttttgtttctgggaaatattaggaatgctttttggcaaatttcaagggaatcctatttggcattagaaattatttattttgaggcctcgtgtaaaataagcttcaggattttgaataactttgggccctggagagagtaatacctaatgaaaactgcaactcaaagaaataatgaaaggcctctttaggaatcaaggtggtagctctagctcttgaagtcttctaatcaaagagtcaacaaccatttttgatctctgatcgccaaagcaggcctcagaggggtcaactggccatgcagcctgatctcagagtaatggctcctcctatttcaagattcaactcaagcatcaattcctgtaagaaaccttgacagaactgccttttctcccacctccaagtcaatgtgaccactccctttttgccttcactttctctcctgacttgcatttgatcagctaaatttatgtaaaaaaatgaagcctacaaccctaagctgatctgaaacacacagcaaatggaggtagccacatatatatttgataatttcccagtttatagcataacagttaaatcattgtaatttcttatggaatgtatggatcaaacattacatttattctgtattgtgtgcatttggagtaatccatttgacatttttttttacattgtgctagaaaagttaatgaggccactgaagagaaccaaaagtaggaattagaactgaagatacagcaagaattgctaaaagaaaggaaatactgtataaaagagaaaaaagacttttatggagtgattttagagtaactatggctttgtaaaaatgcacatcagtttatcagttttataagccaatgcttggtgggtatggagtttttcagtgatccagtttcaagtaaataagcaacgaataagaagaaattgtgtttctttctagaatgtgttgtcaaccactgaatttaatgctaccaatagatgcagactcatgaagtgcagtatgatttcgataaggcctaagcaattatcaaatcagaaatggatctctcatgctataaaattgtacatttaagcaaataattttaagataattggctttcaaactatttttggatgtatcagaagggatggttgtggaaataacagcacagtaaatgaatagttactggaggacaggaaagcagaaaaaaaatctgaagtgtaaggagatacagtcaagctgtttataaaatacatttagatacaaaagaggtcactgtgtggaaaacctttagaatcactgttgaaagaaaaaaaaatgtccacttcccaatttcaagttctattgggattgtttgtattataaagagttgactaataaattcctgccaaggattatttccctatccaaacaaaatgtccacaattctttatgagagaagatgatacccatagcttctgcttcccgcagtggcactctcatcacatatattggtaagtatagaggtgccaaggagaagcaggcaacagttttctccatagcatccatagtcatgctgttcagcagataagcctagtacagttagtatgtcctgattttttgctaaatcctgggaaaaatgaaaagagtcttccttatgcagttgtgttttgctgctgagttgtgtttgcagtgtattagaagaaatacatgtaggaagcctgttttcagtacaccactgtattactccatggtcttgaatttctgaggtcttaaaatagggttattaatattacggagaaagtcacactgctgggtaatctgrttgaaatggagacagagcataaaccaatagaggtgtacacatatactaagaattttgactggttaagggaaacaagaaacaaatgtatttgttttcattagtaaatatgattttttctcaggatatgagtaagaattagtgaagagggaacaatattaaattattttccttagtaaggtaggatattaaaaattaatcccttctatttgtcagttttccatgtccagagttaattgaacagttgtgttaacattaatataacattgcttgctggctaccaacaataatagcatggaagaatgttttaaggtatgtcttctggtagaataactatatcctcattattaacagtgtggaaaatgtagaaatgtagaaggaagcaaataatcactcatccagagatgatccatgttaatgttttagtgtatttttttctatatttgtagctttgccaatttcacacagttactttttaatatatacaccggggttaagtctttgtatgattacaaaataaattcttgttcaatttttgagaaaaataaggaaactatgaaaacagtataaagaagagcatgtgtgattcctagaaaacagcaaaaataatttggaactgcttttaatgacaagggtaggcaatcaagtttgctaaaatgaataggataatcagctccagccataaataaattagtatctttttaatgtgtctgttgtgtgtattctgcagctggctcttaagtaatttttaaaggaggcctgatatgtgttcggagggggagcaacatgattagaatatggtagctagcttggaataggcatcatcaatgattcgaatgcatgctctagatcatgcatgctttggaagctacaaagcttctccaaatcttggagaagcaacacagtgagaaacctgtcactaagcttttgaggattcctatctggaagaggactgttaacagtaaactcaggctgcagttgattttctttccatcatcaacatattatctgggtctagtgaattacaaaccctcctcttggcttaacattctctctgatggctttctgcacattggcttcctcttcttgctatcacggtaattactcaggagacataccataggttttcttgggtttagatcagcttaggaaagaaaagaaaacttaatcagtgaacagatttctttggcattttccatgtaatcctgggacccctgcttgttagttttgtcctgtttcctgttacagaaaaggctgaaaatcagcatgcagatgaatgagatagcagatggttttcccgtgatagagaccaacaatttgtgagatagaatagtaacgacaaacatacataagagaaaaggcagaattagagtacagtattttaaaagctttcaggcgctcaataaatgctcactattgttaaagagagagaaaaaaggaagtcctgtataatacatcaataagattttaattttcagttattattatttgagctttatttcccagctctctgacacagatttaggggtggtgtggatattcttagagtggaaattattgaactcttagattaaaggtactcgagttcctagcttgccctgtaactacacatatagagaagatcactctcgtaggtgctagtaagtaggagataaaagttttagggggaaacacagagggatactcagaactgggagcagtcctaaggtggaccttcaaaatgattcatgtcttagaaaatatgatttaagagaagttaggtctatagggtcattttatctgaggaaagatggctgtaaggatctttaatgataggagtcaaatatatgagagattgttgcaaggagaatgttaaccagctattctacaactcgactggggatagaaatagctttaaattacaatatacagaatttagattagataaaggaagtatgctctgaaagtaagagttgttaaaagttagaatatgttttccaagtaggttacaaaattgttttaataaaattatttgtgtttattcaaaaataatgaaaacatatatattacatatataaatattgatatattacatatcaatatataaacctaggatataaacccaatatgtaattgatatgttacatatcaatatatattatacatgtattgatgtcttacatatcaatattatacatgtgttgatatattacatatcaatatattatacatgtgtttattatatgtgtgtgtgtctatgtacaaaaagatagctttttgacctcaacagcattataacttgataattgtcttattttggaactcacgctgaagtagctttcagatactgttctagaaggcttaaattaagtatgttgacaataccccaaactactggatgatatttgtaatgaatttcaccctatatcagtacagaagggtgtcacagttcagcaaaacaaaagagaatacgctttgttaaacctctactttctgaattttaggacagtgaggaaatttaacattttcaatttttttttcttttcttgactgaaaagaaagtcaagccagcaatatgtttctgagagagcagtgatgcatttcacaacactgttaactgtctgcttggctttttgaggcttccagagttcagaattgtcttctcttgaataggtcagtgcatttttttccttcagtttttctccttaagcagcaaaacagaccatttaacttccaaatatttacagcttgcaaacagataaacttcccaaatctgtttttttttatgaaaaggaaaacgatcagccacaataatctataatacgatatatttgaatcaaagttattagatgccctagggtcttttcatggcagattttatatatcaccaccattaataaatctgttatcagaattatgtctttctctctgttgatagttatttttagactaacatattcatacctccttctgatgaaaaacattaaaatttgaataaggcatattagaaaaccctaaagctctgtatttacacaaaggagactcataaatattggtttttcagggtgaagcattgtgtgttattccattttgtaccacagggaaagcctagtcacacatggggcctcattaaaagaggatctaaagaaatatttaatggttgaaatataaggtcttattctgaatatctaccttcactttataataatagaaactgaactgaaaagattcagtaagtgatttagaacatccactcattttaaaagtaatgtctaggcctaggaaagtgacatcatgttccaaatgttacaaatccagcgtttttccttgatgtctttataaatacattgtttacagtttttattctcctccatatatgatgccccttttctaagattatttcgtaggtatatcctttaatgagagaacctcataaataaacttcctgaatttgaaaacgagtgagaggagacttcaagtttgtggactgagctaaacatgtgtctactctcccttcaaacatcccatggaaatggcagtaaagacagaacaaagagaatacatttctgaatatactgaggaacatatactccagagagcagaaacaggaagaggggcctctgctaaagctgaaggagtcttcaggagggaacccagctgggctctgtgttctggttggcagatacagagagtagccaaggtcaaaagcagacaaacagaaagtkaggtgattggccacaggtttggaaatggctcaggtttgctctttccaaccccttgcatgtcactgcacatttacctccagaagtaaagcaggagaactctgcaaagggaaccaacamtctgcatgggagggcattgcctccaagtgtgtgggctggcgaccaagtgcagccctctgccctagttatgggagttggagagggacttactggtttgcatgttccatgcaagagctaaagcaaagcacatctcggagaagtgagccaggaaagtggatcaatccatgccaacaacctatattaattaacctgataattaatatgtatataaagtgaaaaaaaagaaagaaaaaagggaaacagccatgagacaggatttcacaacctctgcactatcaacattttgggcaagatactcttttgttctggagaagtgttctgtacattgcaggatgttaagtagcatgcctggtctctatccaattgatgtcagaagcaagcaacatccatccctggccactgtgaacaaaaatgtctcaatatctagacaaagatattgcagcatactctggaggacaaaaccagcactagctaagaaccattatcctagagaaaatagaaatggtttagagaagagatcttttcaagatatctaccttggtatcctcagacatactgaagaattacagtctctaaaataattttctgatacggaaaatgaagaaatcaaaggacagaaataacccacggaattttaaagtttaattaacaaaattgttgaaaaattcaaggaaaccttccaaaaggaaaagaaagaagaagttataatatgtgaaaaaggggaagagacaaagagaatccgtttaggaagctaagtgtctgtctaataggaattctaaaaccagagggaaaaagcacaataaatgagacaaaataatcatgacatttcctagagttaaagaaaggcacgtcctcagaatgaaaggcccaaataatgttgagaacaatgaattttaaaatacctacatcagacacatgctaatgaaactttagaataccaagacttaagatcctaaagattttgaaaaagaaaaacataaacaaacattctatcataggaatgacaatcacagtcaagttttcaatctgcatcttgaaaatgccagatgataacaggacagtgacctaatgttcggacagaaaacaaacctaataccaaatggaatcaaacaggaaactcagaaatagacacgttaatatgctcaagtgatttttgacagaggtacaaaagtcattcaattgccttttccacaaatggtgctggatgcccaatggcagaaaaaagtaagtcttcacctaagtcttacaccttacacaaaagtcaactgaaaatggatcacagacttaaatataaaatatgtacctataaaaccttttagaaaaaaacaggagagtgtctttcagatctaaggtgagccaaataatgggtcgacttgatactgagatcacaacttataaatggaaatgttgataatttggactttgtaaaattaaaaacctttgccctgcaaaagaccctttaaaaggatggaaagacaagctacagattgggagaaaatrtttacaaaccaaatacttgatctaggactagtaactcaaaagtcaacagtaaaaaattttagtaacaatctattttagaaaatgaacaaaagacacaaagagatatttcaccaaagaggatatacatttggtgaaaaagcacatgaaaagatgttcaaggtcattaaccattaagaaaatgcaaattaaaactacaatgaggtatcactatccaactatcaaaatggctaaaataaaaagattagtgacgagaccaatcgctggcaaagatgcggagaaactggattactcattcattgctgctgggaatgtaaaatagtacagcccatactagraaagagttcaatttcataaattaaacatacaactaccatatgacccagcaattgcattcctaggcttttctcatagagaagtgaaaacttgtgttcacatagaaacctgtacgctaatgttgaatgttcacagcaactttatttgtaatagctgcaaactggaaacatctccagtgtccactaatgggtgcatggttaaacacattgtgatacatccataccatggaatagtattcagcaataaaatagaacaggcatgcaatggaaagttacatgcaacagcctggatgaatttccagagaaatatgctgagtgagaaaggccaatctcaaaaaattacataatgtatgatctaatttttataccactttgaaacmataaaattaaatgaagaacagattagtggttgccaggggttaagtaaagtgggaggaaagtggttgtggctataaaagtgccacatgaggaatgcttgtaatgatggaattgtctgtttcttgactatgagtgtcaatatcctgaatgtgatattgtgagatgttaccatgggggcaactgggtaaagggcaaatggaatttgtcttatttcttacaactgcctatgaatttacactgatctctaatgaaaagtctcatttaaaaatttgatagtgcttgattttatcagttgatcaagctgctcttagttgaaataacaatttcagaaggatcagcataatgaatctaccagtcactgaaaactctcaattatctgtcttgtcttccctttcagtttttgtttcatttctgttttagtaacctcttagaaaaaggtagtattaaaggagacctaggtctcttttaccaatttaggataacttcacaatctccgcagataaattggtatstgtgtacacacacaaaaataggaaattcttgtgagtagtttacaggggaagtgcttaatatataaacaaggcagtgctctggtaaaattacttattgcattgagattaagaacataataaaattattaaaatagcctaccactttcattacagacttaaaatgttcttccttttatctctgggggttkgataatccctgtttattgttcttttattttgctgtatatcacgttggccatttaatcattggctctttagcagggtgggtgtagagagcattaaaaaataataaatgatgcagtttatcatcacctccctgtaaaacacaaggcacgtgaaggatatgagtttcctttaagctaacgtatttacttaatgtgatttcaaacaaactcctacaaaagtttttggttatggcatccattttggaatttgaaaaatatatataattcatctgaaataaatgtataaaacagctaattttctggtaagatataatatgtgggattatcactactacttttcaaaatgtagtctaaagaatattacttaaatgagctttatgctgagtaaagaatatgggggaaaaaaccctaagagtataaaagcccagaaagagcctcttctacgtatgagagtgtatgtatgatatactatattaatatatgtattgtttaatataacctattttgataaataatagtataatagactatattatatactattatataatatagggaggaaagtaccattaaataaaagatactggagcaactggataactatttgaaaaacaataaacttagaccatttgttgcactatacaccaaaataaatttcatatagattttaaggttaagtgggaacaaaaagatatcacacacaaaaaactgtatctgaaagtaaatatgttctccttatagtagagtgaaggaaatcagttaaagcattcaaataaagagaaaaatgtaaagagaaacattagtatatttgctatataaatggtaaacgttttatatgtcaaaaatcatttgtatattaaatatttatattaatctgtcatatgtggtagatgattaatatacctagcatataacatgctcatataaataataaaaaaatcataasagaaaacaagacaaaagccrtatatgtagataattcatcaaatggaaaattataaataagcaaattttgaaggaaaataaaataatatgttctatgattaaagtggtcaatgtcttttaaaggctaatattaatagctgacttgtggtctgtaaagaatagtttatttaacatgtgacttataaaaatatataacacttttggacagcatttttagagataaatattccacactttttgtagcattgattaactttattcacatcttaaatacttataaaaatctgaatactactttatttcaatgttatttaaattggtgtcaagttctggctaatctacctaccgaatagtaagaatattgttatgcagatcattgttattctataaaatgcagtaccattcagtcattcaaaaatacatttccaaaaaatgtttagagaaaatgctaaaattatgctaagtgaaaattcagacaatatttaaaattttaatagtctgacagattctgatatagataaacagaaagaaagaaaggtaatgtaattttcatgtaattgtacccawgtatatggggaaaaaaggcttgaaggcagtatacaacaaaatgttaaggacttgttatttgcatctactatttcaagaattccttctgaatataaccaacagtttatgcacaaagaatttaattgcaatattcttaataacggtgaaagtcaaatattcatcaataggtaagtgtttaaattacattatcaaatactcrgatgatakaattctatgcaggcattataattatgtctttgaagtgtttctgttttaataatatgtaaaagtgcttatgatataatgctaagtaattaaaccatatgaatgtatgttaaaaggctgcatgaaaatatggtaaattgtttgcataggttatcattgagtagtgaaatcataattgctatttctttcttttttctttttttttttttttgagatggagtctcgctctgtcgcccaggctggagtgcagtggtgcgatcttggctcactgcgagctccgcctccygggttcacgccattctcctgcctcagcctcctgagtagctgggactacaggtgcccaccaccacgcccggctaattttttgtatttttagtagagacggagtttcactgtgttagccgggatggtctcgatctcctgacctcgtgatccgcctgcctaagcctgccaaagtgctgggattacaggcgtgagccaccgcacccggcccataattactatttctttcattatgttctggacactccaaattttcaactacagggtccagcctttgcaatcaggaaaaaaaaagtgtttaaaaacatctctgaggacttacatataacaccagaaggatttatacatttatttagttaatgtggttaataaaaccaaaatattctttaaaccatgtcttagcttcattcttgtctgcaatactttggcactgcctggatttggcatcatgaactgctgcaactaaaataacagtaaggtgcatttatacaaaggaagaaatgagagattaaggtcccctgttaatactaaggagcctgatagattttgatatgttttgtgcactggtatctgtattttcattttattgatttttttctaaggaccttacagctaaagccaggtccccaaagaagtcaggggtttttgtgttacccacaacttggcagaatgtctgcaattactccttctgcttttaactgactttgaatcctctccttttggcttgagtacctggctttcagccaggagaagggaaaatactctatctgttggttttcaaatgtcatttcccctttggctttgttgatggtaaaattctgcctttgcatctgaaattggaaactcttctaatcctggagtctgagtgtaattaatcggaaggctttctcttatctgtgtctaggatcagcctttagtctgatcttcatttttatccaggtgcaaaactcaaatacttttacctttagtgcagtggcccaaattttgtccctagttctgcytgtgctatcattaactgtcattttttaattatatctacacacgaatgtgggccagaggcagcaagatctggattttctcttcctctctgagtccctgacccttggattgttcttccttcttttcaattttggtgggttctgggtttagatttgtagcctaacctagtcaacaacttctttggcatagaaaagaattatttctgatgtgtatattttcccagaagttagaatacccctttgatatatttatttgtgtttaatccacagaaagaatgaagaattaagttatattaacaagagtatcttgcagtatatatatgctttaaagttcacagtgactttgacatgcctctttcatttagttwtcacaactcttggaacgtgtttttgcccattttctgcataagaaaactgaatttcagtaaaattaaattgtttttcccaggcaacccagccaggaatcactagtccccctctctcaaaatccagcatttgctcactagaccagagctgctttaaatgacaatagtgtatggaattcattatagtagaatccattctaaacacattgttaatggtttgatcaaacatctttagtagcaccttttcattcatgttttattatgtatgtgtgctacccactttctgtgcagaaatttcaaggaaaaggaaattaggctttctgtaatactcctaatccctgtccttaataagtccaaactctttaacatgatacataagactttcactatccggggaccccagggtactgcaccattctcatccatgtttctcacctctaagcttgtgatactcctgtcatgcagcattttcctttgttgtccaaacgtgtcctgctttaaatgttaccattctcaattctcatctgcctggtgaccttgtgtttcagtggttgtctggagcgttagtgttcattagaataacctggagggtttgttaagacatagcttcttggacgcccacttccaggtttctgattcagttgatctgggccctgaagttgcctttctaacaagtttccatgtggtcctcttgctgctggtctggcatcacactttaagaagtattattctacttatccttcaagacctcaacctaattgatctacagatccttttccaactataggaatatttaattgcttgttactctatgctttcaagctcttgtttgtgtaacatctcacattttttggtgactatttatgagtgtcttctttgcttaactgtcttccttttacaagggaaaagacttgtttgacttgtgtttagatcctcatgggctaacatgatgggaactcatgaagaatttgtatgaataaataatgaacctggaaacctttgttcatttaaagttgcttgtacaggatgaatgttttgcttcattggtttccattattattgtcttcgttcccattcaaattctgtttctaggcaaactggaagaggaaaactatgtaaactgaaaatacaattctaagcctcccaaccatctgagtggaccccttctctcaaccaagggcattccaaagttaacctgaaaaactagttcaggccatgataggatgggggagtaggacatgcctcaatattccctcctcccttctggaactcaggcacagctgaccagtattaacattaaaatagattttaagactgacaaggcagactgtttatagcaataagataccacattccagcctgaatctagtatagtatcacctgacagatagcagaccctgaaagaaatcaaagtattttatctcaaattatggttttttgccatatcttggaatagtcctgcaaatctgtctctcatgaggaaaatccacattctgaagagaatccctttccttttccaggcctctttcctgatccagaagaaaatcaactctgataagaaacatttacaatctattctctctgaagcctgctacctggaggcttcttctgcataatgggaaccctggtttccacaaccccttatcttgacccagacattcccttctattcattctaggtctttagactataacttgactctttcatccaattagaaaatctttgaagctgtccgggcatagtggctcatgcctgtaatcccagcactttgggaggctgaggcgggcagatcacccgaggtcaggagttcgagacaagcctggccaacatgttgaaaccctatttctactaaaaatacaaaaaaaaaatgagctaggcgtggtggtgggtgcctgtaatctcagctactttgaaggctaaggcagaatcacttgaaccccggagacagaggttgcaatgagccgagatcgcaccattgcactccagcctgggtgacaagagtgaaattctatctcaaaaaaaaaaaaaaaaaagagagagaaggaaagaaaatcttagaagcccctcacaccttgccacttcaaattgtccccccttttcaaatcaaaccaatatacatcttacatatattgattgatgtcttatatctccctaaaatgtgtaaaaccaagttgtaacccaaccatgtaaggcacatgttcttaagatctcttgagggatgtgtctcaggctactggtcattcacatttggctcagtctaaatctcttcaaatattaagagtttgactctttgacaactaatacatatatattttaataaccactatgtgccaggaactgtgcttcatatatattattgtgtaattctcaragtaattcccatgacataactatagtacatctgttttaaagatagagaaactgaggctcaaaaagactaagtattttgtaaatattctaagactggaaataatatttgatttcaagattttcttattccaaaatgtgttctgatctgctgctctaccccatctctactaaaaatacaaaaattagctgggtgcagtggtgcacacctgtaatcccagctacttgggatactgaggtaggagaatcacttgaattcaggaggcagaggttgcagtgagctgagattgcaccactgccctccagcctgggtgacagagcaaaaatctgtctcaaaaataaataaatacgtaaatataaaattaaattaactcttgcttgtctcatgacaggtaaagatgatgggacagtggctgcctatcttcagataaaataaaggtaatctccacattaacattactagcagtggttcctgctctcttctttcttttttttctttgcatccagattcaattcctaaattactcccagtatgacagtgatttctactgtgtttctccttcactctctgcagatcattgaagaggtagctgcaaatgcctttcacttgcatggcttttccaaaatgtattcagattggctgaatttctgaatcaaatacaatttattttctctcttatcctagcagaagatttaagcaaagagatatgtaaaatatattaaaaaatttttaagtttccttttttttttttgaggcagggtcttgctctgtctcccaggctggactgcagtgatgtgaacatagctcactgcagcctcaacctcctgggctcaagtgatcctcctgccttggcctcccaaagtgctgggactacaggtgtgaatcactgtgcccagcttatttattctttctttttttttgtacccattaactatcctacctctctttgtcccaactgcccttttcagcctcttgtaaccatccttctattccctattctcatgagttcaatcattttgatgtttagatcaatatgggacttatatttttaagcattttgatttaattttcatcckttggccaagcttggtgttctgcatttgcaaattttgttagggtacagggtagtcatggctgcaatctggagaaaataatattcaagatagtgttccaggacttattattatcatttcttactggtccattggctgagttggaataccagctaatttattagatataccctatgcttccattgtgcaaacctcagcctatacttggctacattctcttgtaaacattttcaagctttttaaaaaaattccaaggttaaatttgagttgtagaaaagaaatatgaataatggccatcataattattccattataaaaacacatacacacactcaataaaatgtgttgttttaaaattattaccctaaggcaagtggtgaatagatccaataaaaataaaagaaatagaatgaataagaagataataagacgaatggaagactacattctttctactgactggtcatcggtttttctaaatcttggtcctttatctccaatgggtctttgaggacaagcacatcttatgtactttgtaaatatttgctgtttatgcacattttgagtatcattgtttagctttgcttttcagatgcatgaaacaagtamatttgaggcagcaaatgagtaatttgtaaatctagacacaatgagaaggcaattaagaatgctgcttgatgaaaaagaataagagaataatgttgtaggtaagggacaaactaatttcactaatagtggctttatatacagtccagtatgtgaaaatacttaagtaattaacattaacattcacactgtcatcctaggtagtgataagatactggcgaccacacacaaaaatggaatagatatctgtgtctgtaaaactaaaaactcttcaagggagaaaaagctctagtgaaaaatggaattcaccaggaagtcactcaagagaatgcaagtattaaaagcactttattataagataaggatgtcccattcttaaaataatctcctagggaaggcttcaaggatagcattatactaagtagagaagttgtctgacaaataggtaagtataaaaatcagagaacctacagaaaacaaatcattctttgagttgcatgaactttaggaaagagtctttatcagccatgatcaaataaattggacaggtcatataacaagttagaagttgccaaaatttttttatagaagaaacagatgtcatcttcttttgtaaactacatcctgaacatatcccatcctgactgcttcgtggcgtatataaactcccactccacccccttttccccgtctcaagcaagctgacctaccaagctgtgtatttttaatcactttctatagcaatcaagaatttgccatcagagaaactgcttcactgcgtcttatctttccatgcctgttcttgctaaacagatttaagataagagcaactggcagtaagtgcccttcctgaaaacagaggtcacagatgtttctactgaagcccagtaaatggttttgggagacatttgaaatcttagtcatattcaaatcccaaatacaatttctcttttttttcccagaaatttcaaaggttttagaaatattttctactggaaaggtatctctcattcttactcaaaatttagacactaatgagtagatggcaagtcttgtttataagcattaatcrtgaagatgaacatttataactgaaaaaagatgttcgaattttggggtttgtaaaagaactaggaatggagaacatttagagttcactatgtggtgatattcacaaaagcaaatgatgatataactatgtcacttggaaggagcttcaggcaggttctttctcttctacatgtaacatgtaagcctgttttggggtcattgctgaggaaaactacttcttaagacaattttacgactgcattgtttcaatagtacaccaaactatgttggaaagttatgacctagaatctgaaaaagaaaaaagtgatgaaggaataatgaaaggctgcatgacagaagtatttagtcttcattcctgtgtttgaagcagaaaaaaaggtattgagggctaaccagactctgccttttgctaaattgaagagtatcacatcaaaggccaaagatccattttaacaggtgccttaaaaagttgtactaaatgatctctgtgcccctttggatcatgaattgtctacataactgcacaacgaatgaacgtaagaaaaatgaattggctggtgaagcctgtctggtaaacaatccatgatcctgagggaattgtagttttgcaaaatattcagcaactactttagtttaaatattttatatgactcattgaagctccaggaagatactactttcttctcaatatcagttcctggttattgtcatcattcctttatcagagtttgtttccttgtcaaatgaactcttaatacatgtatctatcactgacaattttgtagaaaggtcattatctgttctgtttcccactccatgaaacggaacttattccattcaacttcgtgtaaagtcttttcaaatgacacaactgtaattaggaaagatgtcaataactatttacagatatttatgttgtattcagaactgtactagttagagtgtgtggtttaaaaatttaaaaaaaaagtgggtgagatggtgagacttaactaccctattmcaccactactaggatggtaagaatttagtaagtaaaccagaaagttattagaaaaacaagtaggagcaaaataagctctgtggcattgaactaagaataaaatgtgaagagaaggggtgagctctattatctacttagggatgccttcagtagaaaatgggacttaaaaatgggcaaaacttaggagggtctttccaggaatgagaatgaacagatcctgggataagttaataaggttggatttattaatcacctgagattctcttttttgattattgggtcatcttgtacacatcaactctgattacaaagtaattagtaatcaataattatttctgcatgtgccactggataaccattcaatacgtaaaaatatttaggtgaaaactttgcttgccaaagtttcaaaagttaaatacttaccaggctattatcactatagaaaacaaaggatgagacgttactatgaaaaggatgggtacaaaagtcatttgaagaagaaacgtactaataaaaatatatttcttaagtactttagtctgcaagtggcataattatttgtgtgcaatatccagaaatacatgcttcttggtgggttttaacagacatatttttacaattaaaaagtatatgcctaatttatgttgtggcagattacatttttcaaagacagttacactgataaatcccaacccacatggccatgttataggtgatgttgacactcctccattgggaggtatggaccagttttagtgactcactttcgtccaatagaacgtaacaggaataatgctacagtccaggtcataaaagggagtagaacttctaccttgttctccctctcatgatgttagaccttggaacacagccacatattgtgagaaagcccaaactaccccatgtagagaaatcacatggaaaggcccacagagagaggaactggggatccagctgatatttagcatcaattgcaaaatgtgagtgaaggaggcttcagatgattctggcctagagccttcaacttttttttttttttttttgagatggaatctcactctgttgcccaggctgaagtgcagtggcgcaatctcggctcactgcaagctctgcctcccgggttcacgccattctcctgcctcagcctcccgagtagctgggactacaggcgtccactaccatgcctggctattttttttgtatttttagtagagacgggatttcattgtgttagccaggttggtcttgatctcctgacctcgtgatcctcctgcctcggcctcccaaagtgttgggattacagacgtgagccaccgcgcccggccgagccttcaacttgattcttccatgagaggccctaaacatcatggcaaagagtctaaccatctccattgtgctctgtctcagttcctgacccacagaatctactagcatagcacctctaagttattgagtaatttttagatagacaataacaagataatatgtcaatctggttttcatatctaaatttatactggctccagatattcacttaagattttatcttggccaggcatggtggatcacgcgtgtaatcccagcccttcgggaggccgaggtgggcagatcacttgaggtcaggagttcaagaccagcctgaccaacatagggaaaccccgtttctactaaaaatacaaaaattagccaggcgtggtgatgtgcgcctgtaatcccagctacttgggaggctgagggaggaggatcatttgaaccctgcagaggatgtggtgagttgagatcacaccactgcactccagcctgggtgacaagaatgaaactctgtctcaaaacaaaaaaaaatttctctctaatatacaaataatatcactttcaaaaatgtatctgctcttctaaaaactcagtttccaaatagtgggctagtcattttgccaaattttagaaaacagttttaaaaaatcacacgtagctccaaatgtggtgcactttccttggttttgttcagtgctcaatacattgatgttgctaaaggccatatcagtgccctccgaccatggaagtttggccataactagttcaagccctgaagaactgaccctgggagtcaatccatatgctgctttgtcccaccaagaagaatctctcttctaagattttgaactaagagattgagagttagagagtagctatcgctgaagctgtcaagatcatctagacttgtaccatctcatgccagtcagatgactgttattaaaaagtcaaaaaataacagatgctggtgaggctacagataaaagagcatacaaattcactgctgcttggaatgtaaattacctcagctactgtggaaagcagttagtcagtttctcaaagaacatttgacctggcaatcctattattaggtatatacccaaaggagtataaatcattctaccataaagacacacgcatgcatatgttcatcgcagcagtgttcacaatagcaaagacatggaatcaacctaaatgctcaccaacagtagactggataaaggaaatgcggtacatatacatcatcaaatactatgcagtcattaaaaagaacaagatcatgcccagtgcaggaacatgtaaggaactggaggccattattctaagcaaactaacactgaaacagaaaaccaaatgctgaatgttcccacttataagttggaggtaaacactgagtacacctggatacaagggaacagtagacactgaggcctactggagggtgggaggaaggtgaggatcaaaaaactacctatcaaatactatgcttatcaactgggtgatgaaataatctgtacaccaaacccccataacatggaatttacctatataacaaacctgcacatgtatccctgaacccaaaataaagtttttttwaaaaaaaataagatcatctagacttgggtaggtggccattgtggacatcatacaagcagaagaagctgatctatggagaagacccataggacagtagtattgagaaagcatagagtcccagagagagacaatccagtttccacagccttgactaatattattgctttataattctgtaaaatttcctctgaagccttccagtaagctccttttccacaaacaagcctgtttgactagcttcttaatattaaaaccaaataatttctcaggtggcaataagggggaagtggagtgcattggtcacacaaaagacaacaacatgaaaatcttaattgttttcagtgtcaaacacttgagtttctggagacaaaactccctcttctaagaaaatcaaactattatacatgataattgtcactttgttagttaagacacatttatacaacattttaagatttggagggtagatactttattaataggtggtatggttctgttcttaagttatgtttctgatttttagatagatcattccctgtttctgtttgtgggaaaaatggctgtctcagtaggctgcattataaactcagttggaaaaaactggtttatttgttgaatgagaacttcatttattttgtgtaaatgagcaccactttttattattcacaggttattgacaagcataatattaagttaagatgcttgacattaaaggattaacatgtacaaatttgaaaaacaacagccgcctagtagacactcagaatttctgttcattgatcaactaagcataatatctctgctctttagcaagtggtttaaaaaattgatggttattagtagtataaatcttggaaaatttgcagagaaaatataatttgtctattctaagtatgttaaatggtttaaatgatatgttaaatagtttaaatgatgaatagcgtgaacaatattagctatactgtattagccattagccttgtaacaaattactcccaaacttaccagcttaaaataacaagcatttattaactcagtttctatgggtcaggaatccaacaacagcttcatggaatgaccccaactcaaggtctcccatgtgactgtcatctagctgttggccaaagctgccattttaaagacatgaatgaaacaggattatccacttccaagctcactgtgtggctgttgtcaggaagctttagctccttaccacgtgggattctccatgtggctatttacgacatggcttccctcagagcatgtgacacaaatgatcagagaaagatctaggtgcatggcctcatctcagaaatgaaaatccttcagttttattgtatcaacacaggtacgatgtaggagggacaatacagtgtgtggaagctggagatggagatccttgggagctgagttggaggctgctaccatagctatatctcttgctagagttcccgattttgcagcctgccatcacctcacctaagactgaacagaatcactgcctagatttacaatatcccagtatattctttttcatgtgcactctcactttacatctcaattttcattccgagcagtacttttaagaaagaattatcttcccctttaatgtgaggaaaaactcccctgtgtataaaaacaaaataatcattcaccatctctttctagtgtgtgacatgcagtgagatttaacttcattgctttgttagaatattctgttctctgtggagggccgtgtttttaaaaaatcactcttcagtttctgctgcaaaaataaaataaaattctctgtgaagtttgtcaagtgaaatggacacaaacatggctcaaagtctagaggaaataaaatgaagccacaatctcagtctatgaaaaagagataagttaggataaaactacagcaaaaaatgtacaggaaaagaatgctgctctttaggagagaaatcagaaaagtcagaagataaaatacagagcaaaaagtttactgatcccaacagagaaacaagaaacctcagagcacttatatgcaaagtatttgcrgtgttttggggcccactgactgtaagggaaaccaggtatacacagctttagggcacaatggagagaaagctcttgatatactctcctgagtctcataaacagcaacatcctccaacgtaaatgacagtgaaagaatatgatgaactcctgatgggtrgatgccacaggaggatccagccttatttttcctcagctctttcctcaaggaaaagactgggaattgataatactaaattgacaagtccaaataagccttcaggcaaagcagatgatccttttttttttttttttttaagtatccaaaccagtctcagatttcttcagccagaaagcatgtttttgcaggctttttacaaatcctaagcaaagttatgtagttctcgagagttatagaaaaccaggtttgcatcttggctctgatacccctccctgtgatactttagaaggcttacctggcctctaaaaacctccatcttctcatatgtaaaacacaaaaaaccctgacacatagtatgtgctttgtaaactgtagctcttgttaatagtgaataggttttgtttgtttgtttttcccaaaagaatttgatgcttgtgttttgaggagttaaaattctcaatgtaatagaagactctataataaacttacgtcttcttagggtgatacgaaaattattaaactcaatccccctttagttgcaaacaatcaatactcaataatttttttgaattgatgaacctctgattgtgtgcractatcttaattatgtctatattcttggtcttgtgatgaaaagtatccagaaaatgtctactattcatcactgtatgccttcttctttttagcacagagctttgtacatacgaagttctcaactaatgtctgttaatttaaattgaagaagctttagggagttactacaatttaggtctggaactcacatcccattttccttcttttgtcccacccctacccatttcagccatgcatatgtgtatttggagccctggatcttcaaaaaggcagcaaggagctaattaagccattaatgaattaactttattttttgaagtttataacttatttagacttagtgatctttctttgctcattaacacctctccctgtaggcagagagaaaaaagattaaaatgtgactctgtgaattcttaggcccatataaattcctaagtacaggggaaaagcatcgatttgtaagtcaacatgacattagtcagaagtgttggtttttctttatctgcaggatctgtttccaaacatatttgatacccaggacttgaaactacatcaattatttgaggaatcttgttagggctccatttgtatggagaggtaacactcactggtggcagtggtttgtgggtagaaggggccttcgggtatgtgcggcaaccttgtcaccagaagctgacaccaacaatacacactcacatttaaaaaatgccaaaattgtatccatcacctccaaaattttccttatgtgaaaggttttggcaaatccttgccagattttaaatgattcattctacatttgtatttcacagttataaagcagaactttgcacaacaagttaacttgccaaaatattatgtaaatattgccaaaatattatatcatcaaaatattgtataatatctgtgtattactttttgtattatatatttgtattacataatttgtgtatttatttgctgcttatttaatttataaacataacagaaatataagggaaaaaaagccagataaattttccagaatagatgagaaatggagaaatctgagtccttccttcaagttcattgattatgagttgagtaaccatgatatgctagtatcttttcaaatatataattttttgattatataaagataaggttgatcttcatctcagacaattttccagcctagtagaaacaataaacacagttggattgtaacccaaacttcaactgtaggtcatctcacctaagttagtggatatttggtataatgtttagtaaaaagytacactttgtggcccttcatcatagcaaatattggctttattggcctttaatatcccaaataagaattatcaagaaaataggctccattttcattattaagtatttcagagaaataaaacaataatactgccttaccattgtaggtcattttatagtttccaagggttttcaactatatctttttttaaaaatttgaactttataacatccctttacagagaagacattttacagaggaagacactgagcatcagggacattcagtgactgctggctggtaggcagcagaggtcttgaccagacccctggcttaatcttcagagttcttccatgctgatgcatggaagacttgcccaaggaagttgtctccatatgaaacagccttgaaaataagatgactttcagtctagtttgatcaacatttatgtaaacatgtaattaaaaattgtttgcttcaactcaacagtatgtctctgaatgggaactggttctttctcaggaatattcttggctgaatgtgtctgtgctgtgtcatatgcctcctctttacatatgactgtgggagggtgtggctgtttctataaacactgaaaacagacctgtggctaacaaaggattgtgggtggcagttgcttttagaaaccttggtgaaacttttcaaaagaatgtttcctatcaagcggtgcgttgtacatgtgggagaatccctgacagcacgttgctcttcctggagctccgtgagcatttattcccagtaatgtcctttggtgcttctttccttcatcccttaaygaacctaatccactctagccactcttcgtgatgtgaggtcaagagggtgaacayggcagatgtggcatttatgcgattacattctggtggaagaaaatgggccattaaaatgcaaaccaaaaatcaatgatctgattaattgcagattgtgataactgtaagaaagaaacagagtgccctgataaaaattaagtacgctgacttatttccatagggtttctgagaagatcttcactctggggaracaatatttaagctgcgagctaaaggatgacgatgacacataggaaagaatgttccaggctacaagaccaatcagaacagaagccatgaggcgggaagaagctacatgtctctaacttctagtcagtatgaccagagtgtagattgagacagacatgcagcatagaatggaatgagatgaaaatggagacagaggcgggatctagaatatgctatatcttgagtcttctaaaatgtgtccagcgtctgttctcagtgcaacaataaactatcaaagagttttaagcagggctatgagtttatctgacatctgttttaagaggtcattctattttatatgagtggaagagacatgaaaaagaccagttagaaggctaccagaacagtccagcagagagatgatgttgggagcaaataaagaattccactgtggaaatgtcacatttgagatgcccaagagacatctcagtagaagatttcaagcatccattgtatataaaaggctagagctcaaaggagaagtctgggtcagagatagatatttcagagttttgaacatatatgtgatacgtaaacaggaatacagattaagaataggggataggatcaaaccttgagaaattcgaatttttaagataagatatggaataaaaagataaaactgtgaaggaaagtcagcaatgtgaagggaagagcaagagtgtggagttgtcaaagagaagaggatctcttgagaagaaaggagtgtttgatttgaatgctgctgagaagtcaatacaaagaaggcaggttttacaacaggaccagcctcataattagtgcatctttcaaggagtgtgaagtactttcttcactgatttctgacattccgatttgtcttactttacttcattgcaccaggaggaatttgaagatccatccaagttgtcagccatgaaaacaaaagtgcagcacgtgagccccagctgtgctcctacctccttggtttggtttccatgagtagttaagcttagaaaaattgtgaagaaacttgttgtgtgggagcgatttttcaaagacctacaaacagaagtaccacttgacccagcaatcctaaacttgtatatatacccaaaagaatatgaatcattctatcataaagacaaatgcatgtgtatgtttattgcagcactattcagaacagcaaagatgtggaatcaatctaaatgctcaccaaccgtagactggataaagaaaatgtggtacatatacactactgaatactgtgcagctgtaaaaaagaacaggatcatctccttggcaggaacatggatggagctggaggccattgaccttaccaaactattgcaggaacagaaaactaaatacctcatgttctcacttataagtgggagcgaaatgatgagaccacatgggcacatagaggggagcaacagactctgggtcttaccagatggaggagggagagaatcaagcaaaataactaatgggtactaggcttaatacattgggtgacaaaataatctgtacaatgaaaccccatgacatgagtttacctaaacaacaaacctgcacatgtacctctgaacttaaaaaagaaactttttctgtatcttaggatcatgagaaagaatcacgttcaaagagtaacaaaattgatattatatttagacagggaatgggattgcaagtgaagaatctgtggaatctcttgatttgtgaagatttcttttagagttcagtaatggatctgtgacatccaatttttctagttaaagagaaagagcattgaactaagaatcagagacttggtttgcagtcccggattcattggttattggttgcttaaacttgggcatgtcacttaaccattctgacccctaatttccttatctgaaaatggtaaaaatcatacctacctgatagacttgttgtgagtgttaaaatgatgtggcttaaaacctagaggaggcattcaattaatgataccttatttttattaatattagcatattgggagtaagcacagggccaaatgcaatcatgtatagaaaagcattccgctaactataaaacattgaataaaatgcgctgatgtgtttatgattgataactgttttttgtcagctttttaattttagctgcaccatcttactttttggtacagatctatttactatctaggagttgtgggggacttggtgggtagccagaaaagatgacagctagcagagcttaggcacaggagcagatgtaagtgcaggtggctggcagtgtggggaccctggargcagctgctctcagggtaaaatccacgggaggactaggcagggtgagagagcatccccaggcaaagtagagtgacctgcctctgagagtttgggtgtagaatgcagcaggatgactcagaaaagtctgcagagctttagaaawgcttttttttttttttttttttttgatgtggtgtaaggttagaagactagaatgacgtttgtctattattcaggagatgttctttgtaggagaaagaaagggaaaaagaaaaagattccaaatattttagtgggcattatgtagttccgtctcttgctccttcccttaattccccctccagaggggaaacagatatctgtgaaactgaaaagcttgcatctttgtgagatctgctggagggaagctaccgtttaaacccagtctccattattttaaatggttttaagcctcacatgtagtgctatttatttttccttctaaaaaayatttctgggttatgcctccatatacaaaactcacctttgtgccattgtgctgttttgatgataggtaatttagctagatttagctaccatctattgagcacttaaaattaatctctgtaataaactctattcaggcatttcatcatttaatttaatacaaaccctgtagaaagtggatatcactcctcttttgctaattgggcactgaggtttaaagaggttaagttaatttctcagtttgctatagctagaatggaataggtccattatttcaatataggtttgccagactccaaagcatgtactggaactactgtggtataaaacaatatccactccttagaaagatcagcatattcatcttctatgtcctatttataagtgaaccggtgtgctcttccctctttattgagatttttttcaaagtaggaaaaagggaaggaaaaagcatttattgaccacatgccatatgccatatttctttacaaatattttcccatcattcttagaaataaaccccaaatgaatatttttgtccatgtctttcaaatgaggagattgcttagagaagttgaggagttcgtcaaaatccaccatgcttatttattttcttttcatcttacatttttacatatctagtgattgtcagatactgagttatccagggttaaacagaagttacagtctgtgttaccaagggcctcgtagattactggagaagacaaagatgcaaataggcaattataataaaaaatgctacacagacagacaggaatatattcaagtcactcttaggcgcttctcctcccaaaacttaatcccccacttccattacgccatggtgccttccagaattagcgcagttygcatactgaaggaaactgaggggtggtcagaaacccagtttgtgcaggaaaaaaaattgtggagawcaaaattagcttcagtttttaatatcagccattaattctgaggaacaacttcatccacttaacttgattttccatcttccttgagtcccaaggcaaaactgaaatggaaaagaatctacaggatgctttcatttagcaaagaggcaaacaaacccaaatcgagcagtacatcatagcaacccactaattggaagtctgggtaaaacatctctcatcccatttctaagaacttagctatttatccaaagcaagacctcttgccccctggagctctattccccaaagagaagacttctttaaagagatcgtccttcttagaaaaggagatttttctttcccattcagatatttctagattggttcacgtggatagagaattctatgccttttttagccactgtgactcagatataattcattttgccttaaaacgcaaagcatcagtaaacattgttagcattgttatgtcacccttttttttttttggttgttcacaaattttctttgttaaaatcctgtgcagctttttgaattcacactaaagaactttaaatttccaaatgaagaaatttcctggccagtttttggttttttttttttgaagatgactgctgcctgagtgtcaacatttgagaaaatatagaatttaatttttggaagtcactagatatagcaacctgcctggtgccagagaagagctgtctatgctgtactgcaatttgacttttaatccatcgtagatctgctaatggtatggcacatgtgaagtggtaaattcttgagtgtttgagacaaacattttaaggtacccatacataatgttaagttcacgtttaggaaagtagtaccagttaataagattacttatttgaaaataagaccagtttatttcaatctggatattcgaattatcaaataatctttttttttcaggattttcttggtgtatgttacctttttagtgaaggaccagtgtctcagagctttattttttatggtagtttaattatttaactgaaacctggaagaattaatagggtcagaattttagatcatgaaacatattttattgctcagtggatgatattcttcttggtattatttgctcttccccagagtcaccatatggtataaattattttaaattcccacaattatcagttatgtatatactaataatatcaaaatcatttgtttgggacattttttgtaatttattgaattttcaaagtcaattttgttcagaccattttttttttacaaagtagcttaaaggcacttagaaactgacagtattggatatttcatacgattttttagaattgcagtatctgccatttatctgaggactggtgattcaaaaactctgtttttggttaattttaattaaaaacatgtccactcaaaatactgctcaatacccaaatcattgcctaccttgtatatagttatttttcctaagggcaaaatagctaagaccataaattacgatggcaggcacatggtttgctgacagaactatataaaatactgttttcatcctcatgtcagctctggtacatgcctctttactttaattccttggggaatctgttgtaagttatagttttaaaaaacatccctaccccactagctctgtcagcttacctttttctgactgaccattttatttctctgaaagaacagatagaaactgagttatgtcttagctgaacttgtagtgccctaaatattaatagctgtgaaccagtttagtttaatttggatatttcccaatcttacacctgcgatattgcaaggtagttataaaaagtacacagaattcatctctataaatatatgctcattttatatcctttacaatctgtttcctagattcctaatccaaagaggccattagtaccaatgacatgatggatagagtaggttataatgtttagcagctcattggagatgacatagtttgccaagttaatttacacattttcatactacatatattatgtacaatattttttgtatggtgggttttcatcgagtacccttctctcttgtaagaaattattttttaagaaacatgttaaagagtaaagatgttttaaataagcatttctcaaatggttggtccttactaccaagcatattctggaactgacactttagttttacttacttccagcacatttcatgggaaatggagatgtccaaggaaacaggaagacgttaattgatgatacattttcttctaatattttgatatcccccaaagaaaaaaatagtccaggagatagattatactagaacagtttggctacattatctaaaagtatgttcccatggaaaattatataataggcttagtacattttagaccatttttttcattttctttttttttattattatactttaagttttagggtatatgtgcacaatgtgcaggttagttacgtatgtatacatgtgacatgctggtgcgctgcacccactaactcgtcatctagcattaggtatatctcccaatgctatccctccccctaccccacaacagtccccagagtgtgatgttccccttcctgtgtccctgtgttctcattgttcaattcccacctatgagtgagaatatgcggtgtttggttttttgttcttgcaatagtttactgagaatgatgatttccaatttcatccacgtccctataaaggacatgaactcatccttttttatggctgcatagtaatccatggtgtataggtgccacattttcttaatccagtctatcattgttggacatttgggttggttccaagtctttgctattgtgaatagtgctgcaataaacacatgtgtgcatgtgtctttatagcagcatgatttataatcctttgggtatatacccagtaatgggatggctgggtcaaatggtatttctagttctagatccctgaggaatcgccacactgacttccacaatggttgaactagtttacagtcccaccaacaatgtaaaagtgttcctatttcttcacatcctctccagcacctgttctttcctgactttttaatgattgccattgtaactggtgtgagatggtatctcattgtggttttgatttgcatttctctgatggccagtgatggcaagcattttttcatgtgttttttggctgcataaatgtcttcttttgagaagtgtctgttcatgtccttcgcccactttttgatgtggttgtttgtttttttcttgtaaatttatttgagttcattgtagattctggatattagccctttgtcagatgaataggttgcgaaaattttctcccattttgtaggttgcctgttcactctgacggtagtttcttttgctgtgcagaagctctttagtttaattagatcccatttgtcaattttggcttttgttgacattgcttttggtgttttagacatgaagttcttgcccatgcctatgtcctgaatggtaatgcctaggttttcttctacggtttttatggctttaggtctaacgtttaggtctttaatccatcttgaattgatttttgtataaggtgtaaggaagggatccagtttcagctttctccatatggctagccagttttcccagcaccatttattaaatagggaatcctttccccattgcttgtttttctcaggtttgtcaaagatcagatagttgtagatatgcggcgttatttctgagggctctgttctgttccattggtctatatctctgttttggtaccagtaccatgctgttttggttactgtagccttgtagtatagttggaagtcaggtaacgtgatgcctccagctttgttcttttggcttaggatggacttggcgatgcagactcttttttggttccatatgaactttaaagtagttttttccaattctgtgaagaaagtcattggtatcttgatggggatggcattgaatctataaattaccttgggcagtatggccattttcatgatattgactcttcctacccatgagcatggaatgttcttccatttgtttgtaacctctttaatttcattgagcagtggtttgtagttctccttgaagaggtccttcacatcccttgtaagttggattcctaggtattttattttctctgaagcagttgtgaatgggagttcactcatgatttggctctctgtctgttattggtgtataagaatgcttgtgatttttgtacattgattttgtatcctgagactttgctgaagttgcttatcagcttaaggagattttgggctgagacagtggggttttctagatatacaatcatgtcatctgcaaacagggacaatttgacttcctcttttcctaattgaataccctttatttcctctcctgcctaattgccctagccagaacttccaacagtatgttgaatagtagtggtgagagagggcatccctgtcttgtgcaagttttcaaagggaatgcttccagtttttgcccattcagtatgatattggctgtgggtttgtcatagatagctcttattattttgaaatatgtcccatcgatacctaatttgttgagagtttttagcatgaagagttgttgaattttgtcaaaggccttttctgcatctattgagataatcatgtggtatttgtctttggctctgtttatatgctggattacatttattgatttgcgtgtattgaaccagccttgcatcccagggatgaagcccacttgatcatggtggataagctttttgatgtgctgctggattcgttttgccagtattttattgaggatttttgcatcaatgttcatcaaggatattggtctaaaattctcttttttgtttgtgtctctgtccggctttggtatcaggatgatgttggcctcataaaatgagttagggaggattccctctttttctattaattggaatagtttcagaaggaatggtaccagttcctccttgtacctctggtagaattcggctgtgaatccatctggtcctggactctttttggttggtaagctattgattattgccacaatttcagcttctgttattggtgtattcagagattcaacttcctcctggtttagtcttgggagagtgtatgtgtcgaggaatttatccatttcttctagattttctagtttatttgcatagaggtgtttgtagtattatctgatggtagtttgtatttctgtgggatcagtggtgatatcccctttatcattttttattgcgtctatttgattcttctctctttttttctttattagtcttgctagcagtctatcaattttgttgatcctttcaaaaaaccaggtcctggattcattgatttttttgaagggttttttgtgtctctatttccttccgttctgctctgatcttagttatttcttgccttctgctagcttttgaatgtgttttcatctaaatatttgttatattttttgatgaagggcaaaacattttggttacagtttctttgaatatttcattccacttacgcttttcaaccaaatacaataaaaaaagcaagaaggggttgtcattcttttttttttttcatttgttcttcaatttagcattgaaatattaaatccaaaagacaactacctttagtatgagattgtatattttgaaaatgtgcagaggtttaggtattttataatagtgacaatttacatatttataggaaatatagtttcaaatagattttaaggaggcagctgttaaaatttgacatattactgaaacttaattagtaatatcgaaatatttcagataacacagggatgactgagctaacctgattcaacacatcagttcacaatgttgtgaagaacacattgaacattttcatggaacaatgcattctgctgcttacttcaagaattaggaaggtgaataagatgattcttactctcaaagagcttataatttagtagaagaaagacaataagtctgtgtgcccatacatttattaatacaaggtgggtccgggtcatatcttataatttgtactaagtgtcatggggtagaagagaaaaaaacatttaatgtgatttgaaattgagaatgtttgtgtggatatgtattttatataagatacttataaaaaactaaatgcatcaacccacagattttttgtcttatggcctctgttagaatggtagaatgggaagaactatttgggttgttatatacacaggcctagttattattcccttgagtaaaatagggctttgttacagctaacctaataagaatatttcagtaatcaaatatttaaggaacattgttgaggtggcatggaaagtcaacacaaaaaaggaattccacttgagctgtaattttgttttatttgcttagcgtagattagaattgtgatacttgtactgttagttgcactgtacataaatattttgaattactgtcgctgattggaactaccttcgtgctttaaattaaaaaaaaaagatgtatctgtacattctaaatagtaaaaactctttttggctcaaatcttttaattctgaaggaatatactggcagatacttagtagacataaataatcattaatgcatgtatggtgtatttcattcagtagtaccaaaatctaaaacacattgagttgtctggcatggtttcattgccaaaagttgtgatgtgactctgatgtaacctggtttgttctgaacaactccaaatggttcttcagacttgcccaggatccatctggctcctgggaagccttatgttatcatggctataatcccagactctggtgacagtctgcctgggttcaaatccaggctctggtactcactatctgtatgaccttgaggatgttggtttgtctgtttcccttgcaaaataatgaacattatattccctatctcaaagggttgttgtgaggatactctaagataatgcaggtaaaagtgggatgttaacagcatttggtaagttgtaaggactcaggtgctggctatgtaaaaataaacttttttaagatggatagatacatagatagatagatagataggtagatagatagatagatagatagatagatagatagatagatataaaaacctatacctgaaaacattattttcataatatttcaaaagcttctattgtactatctatgcttttatacatagtaaaagcagatgacatgctggtcctactaaatttacaggttaatttttagatagttactaagaaatcaaactgtgtggaattttctggtacaaaattacaatatgcaataccttcctactgaggtacccattactgaatatttcttttctatcatatgtgaaatgcatcaattttaaatatttggagacatacctaatttaagtgaaaatctcggtatttcctgaaagtcgccacactataacagataaccaatcaaatttgtctagcttataatgtctgtcagcctgggtgatgtggatgggccactgtgttctcaactgcactgtctcagtgattggagccagttcatgaagcgctacagcctgtaggatgccaaggaggttctttttcgtaatcacacacaagcaatgtggtaaaaccctcaagggatagcagttgctttcacaatctatttacacacatacacacacatacacacacacacacacacacacagagttctttgttattttacatctggcaacaggaagagcatgctggacagacctctggcatcataaaccatccttccctctgacctctgtgtgaatcagcagactatgatctctgcagaatttaggattaattgcagcaaagaaaaagaacctctctgaaatctaaaatgtagacttggtcattagttcattttgcatgctgtggaaactatatttggcatcattaacagctgcttccatgagatgttgagcactaaaatatgattggtgaacactcaggattttattttgtggtattggttgcaattatggagatgttgatagatcaatttccacatcatctaaacccttaactaagaaataaagtggtacataatatgcatgtcccctctatatgagactttgttaattttcttaatttaaaaaatttttttaattctatgaaggaaaagaaatttctctttcagctgatgtttccctgaacacacattgtgatcatttactatttcctaagtgattcaagcagcaatcttgttttagaatatttcaactgaaatgccagccctggaatttcagtgctgattttaggaattattctaatgacttcttgacaagctttacctacatcaggagcaagtgaacttggcagagttgggataggagacttgcctccaaaatgttaacttatatataaccaccttgttatcgcattagttgttttcatggtggctgtggtggtcaatagcagaggcaatggaatgagctgtaataagagtcagcaaatctgagtggacttggcttctcccgtttgccatggtgtaaatatccccaccatgattgttttcaggctaccaacatgatgtcactaaatgtggaattgagaagggatgtccaaaatatacatcaataaatcagccctcatttgattttcttctcagtgaactatgtggttaaatgacttttatctacctttatctcgccattagcaggagacattatggaaaaatataatgccataaagtcacctctatgtcattgtccttgttagaataaaaattaagacctctaggtttacttttatgggttgagcctttgacctatctgtggaagtggtaagctggaacaacaaagaggaaaatgagagtctgtgcttttaggcaggtagttaatgaaggaccaggtaggaatgaagaagccaagttctagtccaaattgccattgattatctagaagattttggacaattcacttcatgcagtagctcaacatccatcaaagagtttttgaaagtctattatgtgccaggtgttggaagatgtgaaggtgaacaagcagatgatttcaccttaaaagagcttgtagcttagtgggaaggaggaaaaaaaaggaagtaataataacaaagtaagaaaagagctagcatagagctggggaagcaaaacacacagaatgaaagtggaacctgatcttgcagagtcctggaagggttctgggaagagatgactgtgtgctgagcaaggaagaatgaatagaaagtaggcaagaaggaagggtgagatgagaggcttcttgatttgattccagatctcaggttttatttcaccgttaagtatgatgttttagtctctcttttcttttttagaaaccttcactatgttaaaaaacagtttttttctattttttaattggcaaatagttttttttaaatcacaagtaagtattgtgtaattgtgtcagatttttttctgcacctattaaaataattgtataggttttcctttattctttaatgaggtgatatcatatcaaatattagaccaatattatgtatctgaaaaaatatgcacacacacatataaatgagtgtatttgtgtgtatatgacttttgagaatacattaatgagagagattgtactgtaagttttttctaataatacccttgtgatagcaaggttataatggccacataaaatgcattactaattgctttttatttctctttcttggaagagattgtgtatgattgctgtaatttcttccttacgtatttgggagaattcaccagtgaggccatcttggcctgaatttctattctggaaacgtttaaaattactggttttatttatttaaaagatttagggttcttcagattttacattcttctcatgttaactgtaagttacagtttttctttttttttaatgtgttgttattattttttgtatatgtccatagggtacaagtgcagttttgctacactgatgtattttgcattatggtgaaggcagggccttcagtgcctccatcactggaggaaggcacattgtacccaccaagcaaccttccatcatccactatctcccacccctcacccctctaagtctccattgtccacacattcatgatggacagtgtgcactctgcttccatgtgcacacattatttagctcccatttataagtgagaacatgcagtatgtgtctttccatgtctgaattattacacttaagataatggcctccagctccatctttgttgcaagttggtgtttttcaaaaaatttccttatttgggttgggcacagtggctcacgcctgtagtcccaacactttggtaggccaaggtgggcagatcacaagatcaggagttcgagaccagcctgaccaatatggtgaaaccctgtctctactgaaaaaaaaaaaaatctaaccgggcgtagtggtgcacgcctgtagtcccagttactcaggaggctgaggcaggtcgcttgaacccaggaggcagaggttgcagtgagctgagattgctccactgaactccagcctgggcaatacagggagactccatctcaaaaaaaaaaaaaattgcttatccattttattcaaattgtcaacttcattgacataaagttactgttcttatctttttgacatctgtaggatctctatcaatatcccttttgtttttatacctgatattggtcattcgtgctgtagtttttttcctcaataaggcttgttaagagagttttaattgtattagattttcccaagggcaaattgctggccttgttgatgttctctattgtacacttttttctgttttataaatttgtgccttttttttttcactttttctcatttctatttcctttgggtttgatttttcttttttgactttttgaattagagtatagattattgatattcaactttcttcctttctaatatatgcatgttaggccgtaagtttctctttaatgagtttcagctactttccctaggttttgacatggtattttctatattatttaattcaaaatatattctagcattcattgtaatttttctttaatccaggggttatttaaaaaatatgttgcttaaatttaaatgatttgaagattatgtagttatttttctgtatttgagttctagcttaattctaccgtggtcagagcatatggattgtatgattttggtgctttaaaatgaacttgttttattgcttatcatatggtccaattttgttaaacattcaatttgccctgggaagtaacatgcattttgcttattttaaaagcagtgcattataaatgcaaattaaggcatttatatataatgacatatatatgtgtgtgtgtgtgtatacatatatatgtatacatatatttgcttttgacttgtttcmtcagctactgggagaggtatgtcaaaatctcaaactttggttgtgaatgtactattctttataaaatttaaaactgtgttattaggtctataaacattaagaatgtttgtatatttttggtgtaatgacccttttatcagtatttttttcatatttatctctagaaatgctttgaagcctaatttgttattaatatatcaataattgtatttcaaactagattattcaattcatgtaaacccgatgtagttaatactttatgacaaatttatcgtgcttgagtttggtcaggattctcaattctatatttgatgtcttttatcaagttttgtaaatacttggcctggatatactcaaatatttcttttatctcaatctttatctctccatagcttttgggattctaattacttgtgtcttattcctttatgtcatgtctttatgttcttttctaccatttttatttttttctcaatgttttcatccagaaatttttctgacctattttcttattaattaatcttcttcttctgtgtcaattctgctatgaagcccgtccactaggttttaaattcaattatagaactttctgttcaaaaatttccactttattctttatcattgattttatttcactggtaaaattatctgtctggtcatctttttaaaaagtaatatgaataacagttatttattctaaaatccttatgtaactgtaatatttaaaccatccaccaggtccatttgtgctgagttttctcctggttttcagtcatttgattttgtatgtatgtatgcttggtaattttggattgggtgtcagaaattgtgtatgaataaaatgtaaaggttctggatgatgatctgttatctcagagaggaatgtattttcttcaggaaggaatttaagtacagatagaccagcttgatgcagttagaaagtgagacgattcaaggttttattcctgtcattctgacagcttgttattttcagtttctcctttgtcctaggatacagcccttcagaggtctcaaatgaaagacggggccttttttctttataggtcccaaactccagtttttgtctttcagttccattaaactatggaaagctctgagctactgttttctgttcagcctgtctgccccatcctgcttgtgaataagcagttgcctcaagtgaaataattttcctgctttctggatcttggtctgtcaagttctaactgtcttaatcattcctcagtatcttcaaacatttcccctgcatttatagttgttataagtactagtatgatctaagctattctgttatagctggaagcagaaatgctgccatcgaaagagattaggcattggaataatgtgatctgatttgcattttaaaaagatttttctgaacaacaatatcctcatatgtgcaatgaaacattttgataaaaattgttctctcaggcccttttcagctccaatattctgcaagtcttgagagtactaatagtgtgtcataccatgatttcaagctgtcaaaaccccagggcttttagttttagtaggctaaagttagaaaagcttagactctggggaaaatggccaagaagaagactctcatctttggtgtctttctatgtggcttcatcactgtacttcttgttagctttcagcaacatcctctcttttctgggtcttggtatctgggcacctagactatttttccagtaacctgaccactctctcctcatgtggtggtgccccattccacactctcttctaaaatgtttcatacttgagatttaaaattcactgtccatcctgcatttttctgattttttttagtaataaattaacatttattgggtagttatgtgccagacactgtgctaaacacttagatggaatattttattccatattagctctatgaggtagggacaattattatccccatttacagatgacaaaattgaaagttaggggagtcatgtagcttacctaatgttacagaggtaaagtggctgagatgaattctgatccctggaatgggcatcatttagaggggtggttcccaaaagccagtccacagactgtcttgttctctaatatataaaaaataattcagcaacatctaggagcataaatccagagattctgaatcagtagttcttggatggggcccagaaatctgaatttttttttccttttcaatgattacattttagtttactgtacaatgaaacagagaaaactactttttttttttttttttttttttttttgagacggagtctcgctctgtcgcccaggctggagtgcagtggcgggatctcggctcactgcaagctccgcctccggggttcacgccattctcctgcctcagcctcccaagtagctgggactacaggcgcccgccactacgcccggctaattttttgtatttttagtagagacggggtttcaccgttttagccgggatggtctcgatctcctgacctcgtgatccgcccgcctcggcctcccaaagtgctgggattacaggcgtgagccaccgcgcccggcctacttttttttttaaagatctgagagtgtgaatcttccacctccttttcaaccaaagttgaggaatttgtcctgctataatctcaacccttgagtatttctttttttaaaaaattttattattattattattataatactttaagttttagggtacctgtgcacaacgtgcaggtttgttacatttgtatacatgtgccatgttggtgtgtgcacccattaactcgtcattcagcattaggtatatttaaaaaaaaaaaaaaaaccttgttatctcagtatgtttttattatgcaaatttcctctaaataatgaaagctcctttttaatgttatattatgatagcaaaaggtgtgctctttgtagagttagcaggatatggttgtgtgacaaaaagccaaatagtattttaggctccaatgaagaggaatatctgtgaagggggtctttcttggtatttttgaagttccacttgaaagtgctgttggccatcactaatcatgagggaaatgcaaattaaaatcacaatgacataccaccttaccccccagccagaatggcgattagtgaaaagtcaaaaaacatagattttggcatggatgtggtaaaaaaaaaaaaaaaaaaaaaaaaaagatgtttatacactgctggtgggaatgtaaattagtacaatctctatggaaaacaatatggggatttctcaaagaactaaagacagatcaaccattctatccgacaatcccactacttggtatctacccaaagggaaggaagttgctttatcaaaaagacacctgaatgtgtatagaatcatcctaagtgcccatctactgatgagtggataaagaaaatgtggtgcgtgcatgtgtgtgtgtgtataccatgaaatactatatatatatatacacacacacacacacacacaccatgaaatactattcagccatttaaaaagaatgaaataatatcttttgcagcaatttggatagaactagaggccattattctaaataaagtatttcaggaatcaaaaatcagataacacatgttcttacttatgaatgagagctataggtatttaaaggcatccagggtggtataacggacattggagactaagaagcggggaggctgggagtgagggtgagagagaaataactatgcattgggtacaatgtacactacttgggtaataggtacactaaaatcctaagcttcaccaccatacaattcatctctgtaaccagaagccacttgtatccctaaagctattgaaataaaaaaaatcacaaagtgctgttgcctactccacagccatgcaagtttgattctggatctgagacaagctatgatcacattgttgtagagaactgaggtccttggaaaataaaacacaggttcccaaccagaagttaattttattctgctgttaaaatggaactatgactttkcttatttataagaactgtccttcctttttaaggttaaaacatgttattttattataatgcaaataatattcattatttaaaaatagaaaaataagaggcagatgtagttctagctcttaataaacctggctaaacttttacaaatttcatctgatcatttatatacttttctacatgattggacttatttataatttggatttttgaatagtgctttaacattttttacttaaattgtatacattttatagattatctcttgataagcattattttaatgatatatatgtataaataatatatattcttacataatacacacacatgtctatgtaatgacatatatataatattttgcaatggtgcatatgtgcttgttcccttaagatggatatttatttgactgttttcttattgttggattattttgtttcataaataacattctatgctgaaaatatttttaattgctataaattgcccaactaagacatataacttcctgttatcctttcactacctttgataacacactaaatttttctttactatatttcattcccttcttaatctcatttctaaaaactgtatttctgtcttacaatatatatatcattccttcagtactcctacctgttgatcttctcattgttatttactggcttgtcaggtcttggaagataggcttctcatacaacccaagcctstcttttgacctgactataaatattttattgtttacatcttcccctgcaaagaattcctctaggatctgcccctttcttgttctccaggcagtatgccttggacattctgtagctggctgggactgattccttgccaggtcagtaggacagatgtgtagactaagaaattaactagtgagttcaagtggaggttcctggcctgttggtgcctgtgaacaggattcttttgagtatgattagtgacatgaaggtcctgaataatatcgtaggcagaagaagtgccattactactcacagtgtaagaagtagcttgagttaactggtgaaagagctaaaagtcaatgaaaagtattgaacttttaaaatgtattatctattgaaaagtttaaaagatcatttattgattaaggaaattcctttgactttaatagctgtgagctctaatgggggctagaaactccagcaagtggtacagtttctagaacctagcagataatttttcattgactagaattccatgtgtgatacaatgatttggcaaagtaaatcacaataattattatgttcattgttttctcctttgtttaccttgattaaccatctttggtgattgtttcataattgttgctttctaaacaactttattgaagagctacaaatggctagctcttctcaaccctttaattagtgtctgggatcggtggatgttagttgaggggaaaaggttattttaataatttaagacaaaacaatttagaaattgtatttttttgaagacaacttgctatgtaaccttttataattccctgaatttttctgaaattgatgttttctttagtgtatagcagtgatagcatgaaaccaccactgacttttttagggcaacttgctggctaattttataaaatttgaactgcactatatgaatgaagaatcatctgtagcaattgctcttttccaaatgttcttttgcttcaaatgccgtatctgaatattagattgtttctccagatgttacaggctcatgtttccttctgctgaattcaattgttggttcctgcttatgtttctcaggatttgtatcatttctctgtcttaagtaaggtttttataaatgctcatcaatgttgtagagtttggattcaattcagatagaggctatttccaccggacttttgctcatctacttcctccctggagaatggtgaaaaacagtcctcttttccctcctctgatagggtgatgggctactattgctttctctctcctaatatattgagtacaccgacctctcaccgaaaccttaggtcaaagtgagaagaggtgattgtttttaattggatgattgctaccatatacttctcttttggtgggatcccaaaataaataaataaataaatgacactccccccaaaaaagaggaactaaaaaaaggctgagaaagcatgccatgaaggtccaggcttggacaacaagcataccatgatgtgaattttagccccatcacctactaactgtgtgaccttgggcaagcttttgaactcaccagggcctcaatttcctaacctataaaatttttgtgatcattattataattacaactaagaataagtaycttatcrttttgctgcaatacacgcgtgataattgtcctaaagtgcttagcatggtgtctagaacgyattatgtacttaataattattgtctgaaaaaataaacacatgaagaaaataccttattgtcaaagaatataatactgtgccccaacttgtgaaagattaaacctcttgtgtctccaggatttctaatagcttatcccagaaaggcagtgcagaggacatgtgggctctcttcctactgcagactcrggctrttctgatggtggggtccaagggcagccttgcttctgccatttgctcagttgatcttgtgaacagctgcggttcttgctgtaactacttgctcgctctcagtgactctgtactgtaaatgtttcatgtgaagragcactgctctaaaacaaagctggaaracagggaggcaattgccagagctgtcattgtgctgagtcagggaaggcttcagcaatcatccaaagagatgtggcatttacacctgcagctggatgggttatgaacccaaataggtccttaaaaaggaaggctcatctcctttccccccaacagccccccacccactcaatttttgcctactttaagggaaggtttttggtaactaatttttcatctgctcattaragcttaccaattacagcatgtgttacaaattataggttccaggactttgggtgaaatrtgcttcgtaaataatggcatattttgctgtgagcagtccttgattttggactcttgcattacctttcatctcgcaaattttccgtataggaatacttggatgtacaaatttcaggcaagtatccgatgtatcttatagaatcagctacccgacaatattgtcaaaaagagaagcaacgctttcagatgatgtaagcatagaatcaagcaaggagttggttgaatccttcttgtgcttttcctttgagatcaccttatttcagaatcctaggaggattgaaacattcctactttgatattttcctctggagatcacttgttaaaagtcgtcaggagtgacatttactagtcttgtattttctctggtcttaacttgaaaagttctgctcatcaaaaatgagtatgttgagatgatattttctatagaaattttgtattttacccccttaaaatcctcacttttcacatgaaagtgtatgctcagataaaacaagactcatggagagcacatgggtgagatcatgctaggctctcattgctaggctgagatttgcatttttctgaaaatcagagtgctgaattttcttagctttgaagtagctaatgggacagtgtgtgtatatgtgtgtgtgcccacttgcatataattccgaatyacttgtttatgtgtagtatatgattctatgacaaagagctccctttaatgcaaatrtaaggcattcatgagcatctcatgtataagctcatattttgaactttgtttttcttttactcaaagaatttacaaaatcattttgtggtttgaaaagtaattcagatttcctataaaatgttatataaaattttaaatttagattttagctagcaagtattggcttaactgtagaaagaacttcattttctaggaccattcaatagtctagcttctgctttatgacaatctactcgtgttttttaaaggataataatattaaaacatttttataaatctcacaataatgctttatgtatattaactcatttggtccccacaataaccctgatggatgtcattattattatcctcgttttttttttttgagacagagtttcactcttcttgcctaagttggagtgcagtggcaccatctcggctcactgcaatctctgcctcctgggttcaagtgactctcctgcctcagcctcccgagtagctgggattacaggcgtgtgccaccacacctgtctaattttttgtatgtttagtagaaatggggtttcatcatgttatccaggctggtctcgaacccctgacctcaggtgatccactcgcctcagccttccaaagtgctgggattacaggcgtgagccactgcacccagcctattatcttcattttaaatatgaggaaactgagacacagagagagaatatacattaagatcagaaagctagaaagtctaggaactaagattcagaacaaaatcatctgattccactctctgtgctcttaaatacttcactagaataagtcttattttttataattgatacaactggtctaaatattaatgaagttttaagattcaatttacatatagcttctgtctctgtaagttaccagttattactacctaaaatacacttgkagtcaatagtaacattgaatattcctagattttattttwtaataccaaccagaataggaggcctcaaaayacctgtgatggaaaaaatgcagtgcctgagtgcatgcagctaagcctgatcactagaatacatttcatttatattttataagataccaaagacttcagaactacaaagagaactatagttgctgcaaccagaaacctattcacatatacgtacttttataaatcatgtgcatatgtgtgtgggtacctycatgtgtgtgcatatataaatacatctaaaagctgagaaccaccttagtctggggcattaaaattttagtaaacttttttgatgtatatgttgaataagttgcaaagttgaagtctgttccctgcctccatgtggcttacgtacacttgctaatgagaaaggagcttattacaaatattcatagatgtgatatatatgtgtacatgtgtgtatatatatgtgtgtgtatatatacatatatatgtgtgtgtatatatacatatatatatctttctccccctacacacacatacacacacccctttattcgctctcttttttttttttttttttttttttttagttggagtctcactcttgttacccaggctagartgcaatggtgcaatcttggctcactgcaacctctacctcccgggttcaagcgattcccctgcctcagcctcccaagtagctgggattactttctactatacaaattttactgtcatagacattggcttttgtacctccaaaatgtttgttattatccacggaaagggtacccacattttacttctatggataaattacacatatattgactgatagctactatttaatgaaactttttttgtgtttcagggtctcaactctatctttctatctatctacttatctacctacctatctatttttttctcaattaattccagaatgttaaatttcatgatggcaaaagtcattattaattttgttcactgacatactaagcacttaaaatgctgcctggcacatgtagagactcagaatatgctttcagaattgaatgaaaatatcttgacaaggtagcacagtttttgcttttgtttttgttttaatagagtcagggtattgctctgtcaccccacccaggctggagtgcagtggtatgatacagctgactgcagcctcgaactcctgggctcaagcratcctcctgcctcggcctcctgagtagccagtaccacaggtgtgtgccaccacgcccagctaagtttttattttttgtattttttttgtttttttgagatagggtcttcctcagtcttcaggtacaatctcagctcactgcaacctcaacctcctgggctcaagtaatcctcctgcctcagcctcccaagtagctaggaccacagacacacaccaccacacccagctaatttttaaaaaattatttttagtagaaatgaggtctcactattttgcccaggctggtctcaaactcctgtgttcaagtggtcctcccgcctcagcctcccaaagtactaggattacaggtgtgagctaccacacccagcctaatattttattttttgtagacacagggtccccttatgttgcccaggctggtctcaaactcctgtgttcaagtggtcctcccgcctcagcctcccaaaaggttgggattacaggtgygacccactgtgtcagcctctcattgttttccatctgacaggtgagaaactgaacctcagagagcatggattactgacccagtatcacagctagtgcagtgcagaagcaggagtggaacctccatttggctccactggccagactccctatctgtgactctgtctccaagaagctcttcgaggccagacagcagcatcttctggggtcttttaggtcacaagtatccctggtcttttcatgactacacatttctggctgactttagagctctagatgtttttctcctatgttgatctaccccgtaaggctccatgagaggcttggactattgtttcacagtaggcttcctaagacattttgcttagctccttgaaggcttccacctgctcttgagcttagraggagaatatggcctagtcaaagagagaagagcataatagcagataggagtaagtgagcaggaaacacagagaaatggtgaagaggaggaaagaatggccaatagaagatggaaaggcagcagtcacggtcacaaaaaaagggtccagaaacaatacaggagatgcacaagagatttcattgcttttaagaagtgttatgctaaaatatcttcctctatagggaaaagacaatggcaaagaacttttaaaatttttatttggctacttctatttaagtattaagtatatcgcggtgtacaataaatgtttacttaacaaaatacataaaactctttcctgggctaaaccttgaaagacagtcatacatatttcataagttttttgttgtaaaatatttgatgatttcgcagttagggggtttcttagaaagtgctatacataatcagatataacctttccattttatatttccttgtgtaagcaccatgacttctagtaatcttgagtgtctccccttttcaattcacttaggaattttgcatttaaactattgcccttgtttagggagaacaaaacaacacatccaaaaaaatgaccaaatgtgtacaacctggtattacatttctgatttacataatttccacctcagaaaagttttcttaaatacaaaactcactcactttattttaatgcccgaaagaatagcccagataaatggactccaaatttgaggcctgagtaataatgcattttaggattagactagtcatccttgctattttcgtggtgttcatcacgtacagagtacaacaagatactctattatcccttcaggctgttggataaatacaaataagcacatacaaccaaaacaaatcattgtatctgtgaattgaaatgcatgtcataagaactttaatctggtgcaattgctcttatagccaagtaaatatagtcagcaaagcttaccttttatgttaagcattttacagattacatatgtaagataaatttaagatttgtgtttaaatgacttttaaaagtaaaaaaagcattgggaagacttcttactcagaggttgtggtcagtcattttcaaataatttttcattgccaacatctcatacataaacttatataagcttctacaacccctcccagagtcagccttctctcttctttcagtaacatcctrtgttgccatctgactgaactgcaccatttgtcaccagttccaacacatcttgtcaacataccttttctattggaagaaaaaaagaaaatgggcttgaataaaaacatgtaaataaatgatgagcactttgctcttttggttgaattaaacagtgttgaaaggtgttagctagagaagacttaatagaaagtataacattttaaataatgtttaaggggaaaaagaaaaagayattttaggtttcagaataaataaaagataaaaataaataataaaagattttaagtattagggatgacttgcaaaatctcagaggtaaaggtaagaaacactagacagaaaataattttatttgaatttaaaaaatgggagagaatccacagaccctttgagggaactggatcatctttgcagactccctgagatgtcgaaaaactgtgagtctgcttgctttctcaatggggatgctcatggtatggggcaatttctcagccctgatcatctgctgcctggaaatagactcagtgctgttggtaggggatggtgggagtgagaccggcctttaggactgcaggctgcatgggagtggggtgaggcctgtgattgctggctttcccccacttctctggtatcctgtatgactcaacagtggcagccataatccccctgggaatacaacttcattagactgggaaccacatccccatcccccacagcagccacagcaagccctgccaaaagagaggctgaactcagacacacctatccctgcctccacctggtggtctttctctatcagccctggtagctgaagacaaagttcataatctcttgggaggtctatggccctgtccactgcctaagaaaccttaatactcaaccagatgtccctagggcaagtttgcaacctgtctataggaccacagctgatgcactcttgaaaatgacacctcctggctggaggctaaaccaaaaccagtgcattaaacaaaaacacaaccaaggacctcacagagtccacttcactcccctgctacctccaccagagtaggtactagtatgcacagctgcaagacctgaagagggatcgcatcataggactctgcagatattccccagtacaagcccagagcccagtagctccactgggtggctagacccagaagagcaaaaacaatccctacaattcatctctcagaaagccccattcctaggagaagggggagaacaccacatcaagggggcacctcatgggacaaaagaatctgaacagcagttcttgaatcccagatcttccctctgacatagtctacctgaatgagatgggaccagaaaaacaattctggtagtatgacaaaataaggttrtttaacaccccccaaaaatcataccagctcaccagcaatggatccaaaccaagatgaaatctgaattgccagaaaaaagaaaaattggaaggttggttattaagctcatcaaggaggcaccagaaaaaggtgaagtccaacttaaagaagttgaaaacgtgatacaggatatgaaaggaaaaatcttcagtgaaataaagagcataaataaaaaacaattgcaacttctggaaatcaaggacacacttagagaaatgcaaaatgcactggaaagtctcagccatagaatcaaacaggcagaagaaagaacttctgagctcgaagacaaggcatttgaattaactcagtccatcaaagacaaagagaaaagaattttaaaaaaatgaacaaaggctccaagaagtttgggactatgttaaatgtcccaacctaagaataactagtgttccygaggaagaagagaaatctaaaagtttggaaagcatatttgagggaataattgaggaagatatccccggccttgctaaagatctagacattcaaatacaagaagctcaaagaacacctgggaaactcatcgcaaaaagatcattggcttggcacacagtcatcaggttatctaaagtcaagatgaaggaaagaatcttaagagctctgaggcaaaagcgtcaggtaacctatraagaaatatctatcaggttaacagatttctaagcagaaaccctacaagttagaagagattggggtcctattcttagcctctttaaacaaaacaattattagccaagaattttgtattcagcaaaactaagcttcgtaaatgaaggaaagatacagtgtctaccaggcacacaaatgatgagagaattcaccattaccaagccagcactacaagaactgctgaaaggagctctaaatcctgaaaccaatactcaaaatacaccaaaatagaacctccttaaagcataaatctcacagtacctatataataataacacaatgaaaaaaaaaaacccaacttattcaggcaacaaatagcatgatgaatagagtagtatctcacatctcaatactaacattgaatgtaaatagcctaaatgcacctcttaaaagatacagaatggcagaatgaataagcattcaccaaccaagttttcttctgtttttcaggagactcatctaacacataaggactcacatcaacttaagataaaggggtaaaaaagatattttatgcaaatgggcatcaaaagcaggaatagctattcttatatcagaataaacaaaatttacagcaacagcagtttaaaaagacaaatatgttcattatataatgttaaagggattagtctggcaggaaaataccgcaattctaaatatataagcacctaacactggagcacccaaatttataaaataatcactactagacctaagaaatgagatagacagcaacacaatagtagtgggggacttcagtactcccctgacagcactaaactggtcatcaagacagaaagtcaacaaactctagcctgcaacaaatgaacttaaaagatatttatagaacattctacccaacaactgcmgagtatacattctactcatcagcacatggaacattgtccaagatagaccatatgataggccacaaaacaagtctgagcaaatttaagaacattgaaattacatcaagtactctctcagactacagtggaataaaattgcaaatcaactcctaaaggcatccccaaaccatacaaatacatgcaaattaaataacttgctcctgaatgatcattgagtcaacaaggaaatcaagatggaaattaaaaaattatttaaactgagtgataatagtgacacagcctatcaaaaccactgagatacagcaaaaaatggtgctaaggggaaagttcatagcattaaatgtttacatcaaaaagtctgaaagagcacaaatagacaatctaaggtcacacttcatggaactagagaaaaaagaacaaaccaaactgaaacccggcagaagaaaagaaataacgaggatcagagcagaactaaatgaaattgaaacaaacaaaaacaatacagaaaataaataaaaagctgtttctttgaaaatgtgaatgaaattgatataccattagtgagattaaccaagaaaagaagagagaacatccaaataatcgtaattagaaatgaaatgggagatactacagccaataccataaaaatacaaaagattattcaaggctactatgaacacctttacacacataaactagaaaacctaggggagatggataaattcctggaaatatacaaccctcctaggttaaaccaggaagatatagaacctctcaacagaccaataacaacctgcaagattgaaatggtaataaaaaaattgccaacaacaaaaaaagtccaggaccagatggattcacagctgaattctatcagacattcaaagaagaattggtaccaatcctactgaaaatcttccaaatgatagagaaagaaggaatactctctaaatcaatctacaaagccagtatcaccctaatgccaaagccagagaaggacataacaaaaaacgaaaactacagtcagtatccctgatgaacatagatgcaaaaatcctcaataaaatcctagtgaattgaatccaacagtatatcaaaaagataatccaccatgatcaagtaggtttcacactagggatgcagggatggtttaacataggcaagtcaataaatgtgatacaccacttaaacagaattacaaccagaaatcacatgattgtctcaatagacacagaaaaaccatttgacaaaatccaatctccctttgtgactaaaaacctcagcaaaatctgcatagaagggtcataccttaaggtaataaaaaccatctatggcaagcccacagccaactttatactgaagaggraaaagtggaaagcattcccactaagaactggaacaaggatgcccactttcaccacttctattcaacatcgtaccaggaatcttagccagagcaatcagacaagacaaagaaattaagagcatccaaaatggtaaagaagacatcaaattgttgctgtttgcagatgatatgatggtatacctagaaaccctaaagtttccaccaaaaagctcctagaactggtaaatgaattcagcaaagtttcaggatacaaaattaatgtaaaaaattagtagctctgctatacactaacagcaaccaagctgagaatcaaatcaagaactcaacccctttcacaatatcagcaaaaaaataaaatacrtaggaatatacctaaacaaggatgtgaaagacctctacaaggaaaactacaaaacactgctgaaagaaatcatagacaacacaaacaaatggaaacacatcccatgctcatggatgggtgaattaatattgtgaaaatgaccatactgccaaaagcaatctacatattcaatgcaattcccttcaaaataccatcatcactcttcacataactagacaaaacaatcctaaaattcatatggaacaaaaaaagagcctgcatagacaaagcaagactaagccaaagaacaaatctgaaggcatcacattatctaacatsaaactatattataaggcaatagtcaccaaaacagcatggtactggtataaaaataggtgcatagaccaatggaacagaatagagaacccagaaataaacccaaatacttacagcccactgatattcaccaaagcaaacaaaaacaaagtggggaaaggacaccctattcaacaaatggtgctgagatcattggcaagccacatgtagaggaatgaaactggatcttcatctcttatcctatgcaaaaatcaactcaagatggatcatatacttaaatctaagatgtgaaaccataaagattttagaagataacatcagaaaaacccttctagacattgacttaggcaaagacttaaatgaccaagaacccaaaagtaaatgcaacaaaaacaaagagaaatagatgggaaytaatgaaactaaaaagtttctgcacagcaaaaaaaataatcagcagagttaacagacaatccacagagtaggagaaaatcttcacaatctatacatctgacaaaggactaatatccagaatctacaaagaattgaagcaaattagcaagataaagacaaacaatctcatcaaaaagtgggctaaagacatgaatagacaattctcaaaagaagacatacaaatggccaaaaagcatatggaaaaatgctcaacatcactaattatcagggaaatacaaatcaaaaccactatgtgataccaccttacttcctcaagaatgaccataataaaaagaaaaaaaaaaaaccaacaaaaaatagttgttggcgtggatgcaatgaaaagggaacacttttacactgttggtgggaatggactagtacaaccattatggaaactaaaagtagatctaccatttgatccagcaatcccactactaggtatctacccagaggaagtcattatacaaaaaagatacttgcacatacacctgtatagcagcacaattcactgttgcaaaaatatggaaccagcccaaatgcccatcaatcaaccagtggataaagaagatatgacaaaaatatttatatgtacacacacgccatggaatactacttagccataaaagcaacaaaataatgacatttgtagcaacctggatggaattggagattattattctaattgaagtaactcaggaatggaaaaccaaacgttgtatgttctcactcatatgtgggagctaagctatgaagatccaaaggcataagaatgatacattggacttcggggacttgcagggaaagtttggggactggcgaaggataagagaatattcactgggtacagtgtacactgctctggtgatggctgcaccaaaatttcagaaatcactactaaaaaacttactcatgtaaccaatcaccccctgttccccaaaaacctattgaaataaataaataaataaataaattgaatgaatgaaccaaaggtattgcacgaggaagcaacataaataaacttagtgagtgaaacagtgaagaaaggggcaatgtgatggtggtgataggtatacaggttaccttgttcacccttttaatactgtggataaacagaatcaagtaatttgttcagctaactagattccatgaaaatatgtagccatttttctggctaaatgtaagaagagggaatgaacaattgggttagaaccttcataaaaagacatccacagggaagctacaaagatttcttatggtccccaacaacaagttcgcatactgtgcctaccttgtttttctcacagtttgatttcaatcctctcacattttgtgaggtggctgtttataccaatctgtggcctaagatattcttatgactattacttgtttatcaaaatggtacacattcttcagttgcagctccacaggctttctggaactactgtaattaacattgatttctttatctctttccttatttgtcatgtatgattakcactacatagaatgacatttactttttctcctttttcttttatatgtgctaattctgtctctttagcctagtcagaagctctgagttcgcagaataaccatgaacacagaattaaaggtctagatagatcttgtctaaccctttcattttcaaagaaggaaagtttgtaaaatggaaactacagtgatattgagtgtatactatgtgtcagacagctttaacatttttgtatgaatcactcgtgttgtcatctcaaaggtcatatggaatacatactattattgtcatcattttacaaatgaaaagaacgatatgcagagaagtggcttgctgagggcacacagctagtaagagacagtgctgggattcaactctagaccttctggctctagctcttaactttccaagttagtgctgcaggtagaacaaaaactctgtctcataacttctttctccatttcagggctcttgcttgttctaactaatttgtaccaccataattcttatactagagcataataaaacaaaagagatgcaagtgtttattaacttcagccttgtatttcacagatcctaaacatgtaaacatacacctgatacactctcatcctttccgaagagagcaagtaataatgttatactgagtgattaatgaactgatgtaaggactcagtaatccgcatgcaattagtggatcaacaaagcaatttacgcagtaggtatgtattttgaatagtattctttctgtagggaaccagctgtatgtagtgtttaattgaatgcttttgcatcacagagtgatttggagtcaaatcatcarccgcatttcccaatgtgtcaagtagacagttaacttatcaaaacttccgtagtactcagttctcttccaatgtgctccttatcttgaattcttttgaaatagtgtgccttataattttccaggaatgatttacatgtattcctgttcagagacagagggatggattacataacattccctgaggccctttttgccttcgagtaaatgctctttatcattctaagcttcttactctgagtaatatttgaacatgaccctgtggattccccataacaatttctgatactgtttccctagttgatatgtttggatattttccatactatgcaggctgaattctctttttaacttagtatgttctttttcactctgatgctttgacttttgccatcatagttttctttattttcagagtttatcgactgtcactaggctttcttctgagtcctttcgccaagtcatccatactttgctcttctaatcttctgttataacaggcttcctgttacttatatttttgctgttatactctgaatttgttccagattttctggtagagatttccctacaccaaaaacagtattccaggtgcagccacttgagaattgagtagagataaatatgtgcgcccctttttactgtgatgtcttgccatctgcagttcggagcctgtaaaagttagatttgggattgaaaataagacttccactaggactgccatttgcagcacaaactcacctggatggtaactgctgtctagccgcagctccctttcgacaggtccttctcagaagacttcttttccaggcttttttcttcctgtgcatatctgtgttttcattcattttcccctggtgaataagctggccctttcccaacctgactctcatcttgttatttgatcccaagatctgtaactcctctcagaccatctgcattatttctctgtccttgctgatgttttgcaacattctccagctgactatcatctgcagatttcattagcacaccatttactatgttctgaagatcattaatraagatgaataaacagaagagaagaccttctgcagacatctgtggaatttctctgggctgcccccacaactcgatcgccattgttttattttacctttttggttttttgcctagtgtttcattcacttccctccataagcaccctgttgtcatatctgagtaactgcactcataatgtgtgattttcttgcacagctttataattgcctaaacaattcatcatttgtctgacagcatttttcctttattaaatcccagttttattgacagttttcattatcttctagattgcagaagctatatgtaacaatgtgtgtgcccattctgatttctcctcaatttattactgttttaaaacctgtactatagatgataggaagagagtacgatgagaagagatagactcagaatctctatggctcttcttggaaaaacaccataatgtgtatggaagatcatgcatggggattttcctgcaaggcgctaacagtgaactttctatccaaaaagatagaaagaagttgtctctggttttgaacaatgaagatttatatctaacttatattgaaaaatcaaaggattagattttttaaactgaataagaaccatagctgtacttagagaatatctgtgatgcacttggcactgtgataagatgtgatgtatatcactatgattacaccaaccctgaatggcacttattttcaggtgtgacactagcctatggcggctgtcatgagrattagaaaatggtgtcccctccaggaggatactgcctgtgcctgagaatagagcacaggctgcatctaaggacccactgaccttctaggccagatatctttgtgtgtggcagagcctgcctaaatgtacatggaagccacgatttctttgtcatttaaatgaagaggataagatacctataaaagatagatttgagattgatactaatgtggttcctccatgccatattgtttctctgcacatagaacaaatatggatctaactcatacttctgtgattgcctactaaattcaaacagtactttgtgtttttacttagaaaagaatggatatggccgggcgcggtggctcacgcctgtaatcccagccctttgggaggccgaggcgggtggatcatgaggtcaggagatcgagaccatcctggctaacaaggtgaaaccccgtctctactaaaaatacaaaaaattagccgggcgcggtggcaggcgcctgtagtcccagctactcgggaggctgaggcaggagaatggcgtgaacctgggaagcggagcttgcagtgagctgagattgcgccactgcagtccgcagtccggcctgggcgacagagtgagactccgtctcaaaaaaaaaaaaaaaaaaaaaaaaagaatggatataatttaatatgtaaccttctcttccaatctttagctatgctgttgattttcttcccagtcttcagctatgttgtttttgttattgtcattattattattattatttattactgaatctagaaagaatcatggagaagaagcagtattactctgggccaggtattctttgtaatatctttaaaatacatttgaacgctgttcacatatccctttgtttgcctattagatccggtcaacattatgcaaacacacaccttcatgatattgaatattgatcaatttagtcacatgccatgcaaacgtagaaataccacttaatggctgggcatggtggctcatgcctgtaatcccagcattttaggaggccaaggcaggtggatcgtctgagctcaagagttcaagaccacccagggcaacatggtgaaaccccgtctctagtaaaaatacaaaaaaattaactgggtgtggtggtgcattcctgtagtcccagctacttgggatgctgaggcaggagaatcacttgagcccaagaggcaaagttgcagtgagccaagatcatgccactgcgctccagcttgggctacagagtgagactccatctcaaaaaaaaaaaaaaaaaaaaaaaaaaaaaactactacttatcaaggaatgttttgaatgctttaattctttgacttaaattactatatwtatttataaaggtgtagaagatttracaactggaatgtgtgtgtgcgcatgcacatatacacacatatgcacatatgtatatatgtgtatgtataacatatatatctataaataaaagttatttaccaaagcatcatatattttcattttcttttctttccttttgttagcattttcatttttcttgagtactgtttttattgaaatgcaccttgcactttagctatagagcttttccttgttgaacaatgtagttttcttgctcaacaactctgacatccaggtaaatggaaggaaaatggataggggagttgtgtgttcataatgccactttgccaccctgaaatctatgcagataatctacttggaaggctttgagccccagtggaatacagaaccatgtaagtatcctgcattgatttacagcacctgctacagctgcttggatcttggcaggcattttctctcctgccaaatgctgttgaaattgctgggctggtctagatggaggttatatttactggacatgtttataatcttcagagtgatctaagccatagagagctaatttcccaaagatcaatgactaagggaggatttcagaggttatcctctttatccaatttcctgtgtcctaatgagatggctgaaacctgtttggaatctttctgattaggaactcttgtgagagtcaataaagaatatgacattcataaatctaaataagaggcgacttggcagcctgtatggtgattcatgccacgagaagcctttcccctgcccccaacaggatgtgccatgggtggccaacctgagacaaggtcagacttgaaccaagagtcttgagaggacttggcctctcctggttaattcagaggactcttctggctattagaatgcgctgtgtatattttttacctgtcttgatttaattcaattcaattgccattcaattcaaacgaaatgtatttgttaaatgattattatgttttccaattaagaaggatgacacaaaaaaactatattggtatatggtaaggatcattatatagatctaaaaaagttttatcaaagatgatgataatcataatagctaatgtattttgagtagttactatgtcaggcagtgtgctaagcacttcacacatgttatttaatcctaacaaattcatgaattaggtcttattatacctattttgcagatgaagaaactgtgacttagatgcattaattaactttccatgttaacaaaatccttcccaaatcccatattcccctctcgctgtcttttgccccctctcagctaatcttctaggaaaaacttgtctgcctttatcatctctacttctttacctcccatttgtttctcaacccattgagttaggcttctgccactgccatcaaaatgaaaattaaacagggtcatcaattcctccacatgtccaatacagtatttttgtttcactggattgctcaccaccttttcccacaattaaccacttccttctggaaacagtatcttctcttggtttcttgtaccacatattcctgtgtttcctctggaatcatgagctgcttatctccatttgatagcacctcttcctctgcctaatttctcattactggagcattttagtttcggttctgggtcatcttctcttgcccctggattctgccctgtgtaggggattttaaacattgttggtaccacgtacattattggcagtctcatgaagcctatagactcggagtgcataaaataccctggatatctctcagtatcccaaacgtagttcttacaaatgggaactcttgttttccatctgcaaatttgtttttcctccagtcttgtccatcatcaatccagttgctcaagaaaactagaagtcatctatgattcctcatttatcctaaaacacaaagcttataccatccattagcatgtcttggctattttatcttcccaccgttccagattttcccactttttccttctatccactgccaccctgctgtgaccccttaggtggtgcttaatacatgtttagtgtatgaagaaaggtttggaatggggaaaataaagagacacactgaatcactaggggacatgtaatactctaggcaagacccaagatagaacagggacagtctgaactgaagacaagaaggatgaatttaaaagataagtgtgtccagtggaaaatacagacaaagaattaagagttacaaatgcctgttagtgtaatcgggttgtttgaagctatcttttaaaaatttccatttctttttaagtagccttttacctcatgttctgtgaagtcttttggagacagtaaatcatattgtttgggaaatttaagggtggagatgggaataaaactgaaaagaggaatctttcctagattaagttgacaaagaaacagctttcttcagccatttctctccagacactagtcaaacaaacaggtgagcaccagatagtttgagcagcagctggaacagttcaataagagtctccctctagcctctccttacttctgaataagcaaagttaagctacagtcaactagtcggcttctctaatattctgtattgttctgaggtttaaggctttgtttttttcttggctgtctaggctctctgattaactgagattaatctctatcatcctgtgtaagctaaaccctaaatyacataatatgttttctatctgtatgccatatgccttccatgtcagggatgactccagagacaacaaaagcaagctgtgtttttactgattttgcaaacttgcattcatcagccttgggcattttggcctccccagtgtcagtatggtgttttaatagctgagaaaaacaacagaaatataaagagaggacactgtgaaaatcactttccaaactgacttgtattgaaactgcctcacatctaagtaatggaaaataacagtgattaggataatgcggtgcattacattcggtgacagttaatcctcttattaacttcatggtcatatttcgctcatttgttaggttggaaggactgtgtgagaatrttgtagttcctgtttttctgttcattgggaaagttgggaaaatagttctaaaaataaaagagttccaggttgaaaagcctttgaggttgactgttctctctggagatgcatgtttaccttgtgccctttatccatgctttgagtttgggtacccactctttgaggcctcattctcttccctttagaggattttctttccacctgagcaatcaccagtgagggaaaagtcagtggggtggttcagctgcrtgatatgttgcattgacaaatggaggcagagccctgctccagccccgtgagttggaacaacctacaaagcatttctggcagtgagccaaagaggtgatccctcctctagggaaaaaaaaagtcaatggctgagattgcagttctccatccccttgctgggctgattcatacagcagcattgacactgaggtctcagaagaactgttctcttcccagtccatctaaaaatatctaaattcagatttataatgtcaggagctgataaatttgctgaggaaatgcaagcagtgtcactgccrtgctaggaaatctattctgatgaattgatgagggaaagaaattccaaacatagcagagtctcagagtgccacttcccctgggatggtgagcaaaatgagcatgttttccttgccatcgaagttcccttcttcaaacatagtagaaagtagaatatactagattgaaaaggaatatggaaaatacctttttgatcaaaagcatgacatgacataaaactaaatcttatggcctgtaaaatattcttggtttacgtcaagcaaggggttcccttttaaaatgctctttcactaagacaaaaattccactcacatagccctggtgacttttgattgaatcaggatcttttaaatttggaactcagcaagaaaccgactgtcttactttcctacaggttttgtttgaactttcagaatctaagttgatattgcggtctgctgctaaccagctcttycctctctttagttggtcagtggattctcaggagtattataggatgtttcctccataccacctggcttgaaatgatttggcataggcttcaactctaatttattcagcatccctttagcgcctactagaaaccaagtatcatgactggaacttttctgaaatgatgaaggtgccatggggacagatgggcgtgtaaagaacttattacaaatcaaatcataacataataattgatactgaacaattgctatgagaattgaacagaggaaatgcttctgctgggaaaagaccaagaaggcatcagagaagaagtaaaatttgtggttggggtgatacaatgaatgagtactagcaatttctcaggggagcagagtatgtctaacaggcagaacagcatggcactaagttaggaaaagtaccacctgccttagggacttcaacaagatatttgaagtgtttaaataatttttttttctcacttggattttggcttttgccaaacaactaacaaacaactgttacatttgatctaattattttagatcattaactttgaaaattgctgtttgtgtgatttcctaccttggccttgggcctattatgagctgacatctaatgaacaggtggctggtacattcctggagttttgcccttgtcaaacacttgacccagaccgcaaaatgtcatggtagctttccctgctgaaaccttgtggacttacagctcagtaacgatgttctaatgatctaacatgctatgccatcatttgttgattcataaagtcatgagataaacactaacattattatcactgtctccttgaatgaaaattaaaggctagacttttaattttatgcagtattttcttgactcaattatttgcattaaaaaatgtttaggcatttcattctcatggacctacctcttaatatgctttcttcttaatcaggcaataatttgtaggtttgggcctcaatttcaatagcaagtgagccccaaactcagtaaaaagcaaaaagggttttttttttctgagattcaatatgaaacacagcatacaaatatttcatgtaattttaaaaggtaatttagcatagatatgcatactgaagtatttaggggaagtagaaagatgtctgcaatttattttgaaatgcgtcaacaaatatgacggatggatagagggatagataaatgggtggatatgtttgaaagcaaatataataaaaatgttaccatctgagtataaaatacagctattgattataaaattattttaactttgtggaatgtttgaaatttttacaatatgtttggggagaatgataaggtagcaaagaattaaactggtagaggtgcttggataagaatgatgagatacttaaagtgaagagaaatttctctgacttatcaaaatgtagacacgaatgtagttgtgtctgtgagtcaaagtacacaatctctcttctccattagcttatgaatctgtcagatgagaaaaaagatcatcctaggagaaagagtagttcactgtaaaggccagaactttagtctacttggcaatatataaatagacttttggggtttatttttaatataaaacactgatatttttcgcaaataaggccatttctgccttctcagtcatttcaacatatattgagcacttcctatattcctggcatggtgctaagcacgggggctttaacttcaaaaagttgaacatcaagaatggagaaagagaacaagaaggtgatgtcacacacggaaagaaggacttaaaatgtgctgtgagagctctgaagagggagaagtccctggcttgttagctctgatttggggcaggctactaaacctttttgtgccttagtattttcctctataaaatctggccaataataaatgttaaactactgtctgttaaatagctggaccttcataaatggtcactaatatctttaacccagagaggaagatcaaattaggaaaaaaaaataacacagccataaaatttgtttgacagacatccttctttttcccatccctcctctataccccatcttttgttgccctagtagaatgataaaatcacagccctggagctggaacagacctagccctagattttggacagatattccattccaacccccatttagaggtgaagacactgaaataacttgagaaaagtgacttgtctcaggtcccatagctagtcaatggcaaagtgggtgaacatgtaggataataaagcttttactggagagagaggttgaagaaaagttctttggaaatatagtttatgatttcttaggatgtaagagagaaaatgctcagaaactttttttattgttagaagagaatgtgttttagtgtacctaaacacattgcattagtaggttctcaagaggcatttgttgacttgtattgcattaaacctctcctgctaattgtctgtatagcatggttaacccttgttatgtgggtaactgttcctttaattaaattagtttttaagtcttttagttatattttggtgcctataattgacagaatctatatctcttaaccccacatagatttatgcagttaggggtagtgaagattgcttctctctttgtgaaaatggaatgagtactcttgtaacatctctatatttgtatcttatttgatctgtgggacatagaacattttcttgacaagatagcgatttcccctagagatctgtcaattcacaactttgaattaaggtctctaggcgttctaattatcagagccaatgacccccgctggctttgacctccaatactttagctggacagttcactcagagcaaagatagaggttctttatactaaaggagaatatttcttatcacagaggagggaaagaaggagaataagagaaatagagggagtggaggggatgagagaagggaaagagaaagagagtaagtgagatgtcactgcaaaatgtttttaaattatttagttgatactattaggttggtgtaaaaatagttgtgcttttttccattaaatagtaatggcattattaaaattggcattattaaaagtaatggcaaaatggcaattacttttgcaccaacctaatattaaattttttaaaaataaaagtcatataagagactaagcaaatccacaataaaataaataagttgaaaattagtgaatgaaataggatctccacaaacaatgctgcagaatagtttagaaacactgaaagatatttctaacatgcaatacagatcctttcatgcttcatttgagaagctggtataaatagaaaagtgaatgtacagtctcagaatctcagaccagaaaacattctagagcacaagttctaagacaaaagaaagagaggactcacactctacttgggaatgggctgatttttgctccattgagcagattgcactgttgattaacaaggtagatctggtaagaagttgagacagagacaccacatgctgaagaatctaggctgtcggtgctttttggaatctcagaaagaggtcagggagcccttgtgactccaggaggtaaatgactttcccattgtttgctgttccttcccagcctcaaaaagtagggatgcagacagctgcttctgagggtgattttttttaaatttaaaagttccacctgggcatgatgcagttgctcatggctgtaatcccagcactttgggaggctgaagcacatggatccttgagcccaggagttcgagaccatcctgggcaacatagtgagaccctgtccctacttcaaaaaaaagaaaaaatcagcctggcatggtagtgtctgcctgtagtcccagctaccagggaggctgaggtgtaaggacaactttaatctgggagatcaaggctgcagtgagccatgatcatagcactccactccatcccaggttacagagtgagaacctgtctcaaaaaaaaaaaaaacaaaaaaacaaaaaaacaaaaaacaaaccttggaaaagtctatagcttcatcttatgcattattcccccatatactgataaaattcaagtcccttcatagaacccaaacagctgataatgtggcccataattgtgaattccccaagcccagcatttgaaaagacaatttaaaaaatgagagagaaagagagtcagtgctgataagtatgaggtaatgtgaatgtgtaggcacagggtgactttgtaagtgggaagaaaaggagggagaagctaactttcattaagagtcttctaggttgggtgcggtaaatcacagcactttgggaggccgaggtgggcagatcacaaggtcaggagatcgagaccatcccggctaacatggtgaaaccccatctctactaaaaaaatacaaaaaaaatagccaggcattgtggcgggtgcccccctgtagtcccagctactcgagaagctgaggcaggggaatggtgtgaacccaggaggcggagcttgcagtgagccgagatcgcgccactgcactccagtctgggcgataaagcgagactccgtctcaaaaaaaaaaagtattctgtgagccaagcgctgtacttgattacttgatttaatcctcgcaattatttttcatataacatgatgagaagatgggggtccttgtaagcagcagaactgggatttgaacccaaatctctatgacataggtccccatacattttctatgacattggttgtgtgccatctggctcatgactttccagcaatttcagggataaaagatgtataataatctgacattcaaaacccatatacttttgcctgtgttagctgctctgggtaaaactattggataaatgaggtttggagaatagatgtgaattttcattattcattcccttctgagaattgtccaaataatattatttctaccagggtgaaatagagggggaaaaaaaacccctaggtttctggaaatattgactatgggatataaggcaaatttagatgttaaaagtgatagttgccaaatttgtcaaatgccgtaatgttctcatgtacaaaaaaagttggggaatttttgtcagaaaattatgagttttgcactggccaattcaaatcaaagagtttttttttttttttcttgtctttggcaggttttacaagggggtgtccctgaggggaggtgaaatgagacctagaagcaatttttactgtaacacacacatacccatgcactaacttgctttcatatagttacctgtacatgccacatttcatgattaaaatgcagtccagaaaaatatggtgcactgggctatgtatgagtcccattctctttctttctatttttaagtggattttatgttgcctatttagtctgtaatgaccataagccactccagccaacttgttttaaagctcagagagaagtaggtcactaaacaatagaataataatgtggccacatatttaactttctagtacccacatttccaaaaagtaatttcatccaaaactatcatttcaacatgtcattaatgtaaaacactgttaatgagatattttgaattttttagtggtaggtcttcaaaatctggtgtaaatttgcactgacagcccatcacaattcagtcaagcccacatttcaagtgctcagtaaacacatttgtctagtggctcctgtattggatggcacaggtgtagactaggaaagcattcactcatggtgtttattcaatattttctctatcttctatcatttcttatattaagttgtagagagagagcgcactatttctaccccatcagagaacatgaagggatgcagagaagaatatgttgagttgactacctacctcacagaggacctctgcatgacatttagttgaagggaactgccttctctttttccaggaagattaaatctttatcctctctgccattcagtttaatacctatgtgcaaggcatcagtagagaccagatagatagatagatagatagatagatagatagatagatagatagatagacagacagatagataggcagagatgtttgtgtgtgtgtttgtgtgtgtgttgtgtgtttgtatctctaagtacatgaagaattggcatacatcccagaacacaacagactgaaactcctgattaaagataacaggtaaatggaatggacatccaataaaaacctgtttgtgtttttaaacaaaattaaaagactaaaataagaatagaatataggaataggaagaaagccctacatgacaataatcaatttgggtaccattttgttacctcctggccttctgcaacttaaagggaaaaaaaaattaccaccatcaggcaaatgccttatcatgataggacaaaattcttcccattgtatggctctgttggcatttttaaatgtgtcatatgtggctgggttgtggggtacaagatgtagacttgcttaggagacaaagaccagcataaacttttgaggatccatcctacatggagaatgtagtgaatatgctattgctctaagtggagacagagtcttgcatggcaggaagcttcctaaggtgaccacttgagtcatgaggcttagaagtctttgcagaagagggaaatgagccttcacattaggaaaatatgctttactattacataagttctgggatcaactgatacaaaagttgggagaaatcaaaattttaagtttttcctatgtgtgtacctatgatacaatcaagtttttattcaatttataactcctgaattcattcatcaggagtcctttaggaagctaaacagaactggcaggtctgtcatttggatttgtcatgattgtgagtatttcgttccctgcaattaaaaacgtctgtgggacaacaggatttcaagtcaggagattgttgggtccttgcttctgctacttagctaatctgtgactttggaaatcactctctgaatgtcattttgtttacatctattaaatgtaagctctctctgatagcattatgatgaggaaaaaatgaaagcatgtgtctgaagtatctggtacagaggccagcacatactggttgctcaataaataccagtttctttcccttttactactctaacaatttctcgtttgtattttctgctcctgagctctgtgtcttgaaaagttctgttggcatacacattggacttgattgcttacattaaaattatctattcttgtctctattttgtattaatgaatacaattaatctgattacaagtataaaactatcagtcaggtttctaaaaagttattaaaacatatatgtattacctgcttcccacattccagtgccaggctctgtagaaacaataatgaataatacagctattgccctaaagaggcttcaccaatcctgtctgtggttcagcatcaccaggcaataccaatttgtcatcatcatgctgaatggggagaggtttagaataatcacaggagaacgtaagaccagctcctggccccgtcttgatgggtcatgaaagaacaccgggtactatcctgagttgaaataattctagctcatagttaatctataaagccttatccagagaaattggagattatctttaagcattttgaaatattaagcatagcctgctggccccaaatgacattttttttaatatttacaaattattaataaaactaaaaatttccatcccttccctggaaccccaagcaaccaccgattatttattatttatttatttatttatttatttatttatttatttatttattcattatagagatggagtctcactatgctgcccaggccggtcttgaagtcctggccccaagtgatccctccgcctcagcctcccaaaatgctgaggccacaggcacggatgcagagtttgcagatgggcagctaccattttcgagtatgcagtaactgagttttgtgagaagagcaaagtggaaagggagaatgacttaattaggtctgtcctttagaaacaggtctgcaaaggcagtgttgcaaactaatccaagtgaaaaatcatgggagacttaaatgaaagcattcctgggaatgaagaaggcagatttagtaggattactaatgacaggttggatggaagatacaaaagagaagaaatctatattgctgtgatccattaagtctcattgtctacttttaacacttaatggggtggcagtgttgttattctaggctatcctttatgaggttggggttcttccctgacagttgctgaggctgtgggaacaaacgagttcatatagggagtgagtgaggaggaagacttcagacgctcagggattctacaccatggaggaggctacgaaggagatccattttcttctaaatcattctgataggcttctggatggctttcggtctctggccagctgctgatggaaagctctcctctctgatgaagattaatcatcaaacccaggagataattttattctgctcttctgagtcatgttagattccagaacaattaactttattttccccaaatcttgtatctcttgggaatcttccagtaactttggtttccagtctacggagctacttttggcagcttgttgtcaaagaagtgataattcttaaagcttagagtgctaaactgcaactcagttgagaattgaaaccttttcagtaaggggctcagccccagacacctgggactcctctttctcctttcaccctcaggtacaggagtgttacataaaatggcactaatccacttttacagtttttgtgttattaagcaatacattaagatttaataaccataacaaaagggttgttttctcaccaagcagttattatttgttgtacttctatttctactcatttaccttaggtttgctttagcgatttcaatttagtaggtgtctaatgatatgcctgtcaatgaaactttagagatgactttcagtccttggaatttttttttcatagtttcaagaagcaagacttgcgaagatgatttgcgttaagaggtttgtgtgagttgagtgtggacttaaattaaaagtaacttaatttactcagagtagtagaatctagtgcatttaaattggttgagaggtgcagacttcgctttggaagtcactgtaaatcgatgccgatagagtaaaaagcattctctgttctcttgctgttcctttttgaagggttcagaaggttggaagagcatccaaatcagtataatcagacctattagatcctagcaaagaattttaaatacatacatctttttgcatattgattctggcaatttaaccctcagcttaaaagcagaaagttggttcaagtgaatacaacatctcactctgcacaatattaagaaatagatctactgaaactaataaaagaattccattgttgtctcctccatttaaaaaaattctacctgaaatacttgttagaatttttataaaagtagtatctcatttatgtacaaaatagtttgtgtaaactataagtagacaaagatgtagggttgtatcacttctttgataagatactgatcttgtatttttamccaatgctaggcttaataaaagggtcctgtaaaatttactatgaaatctgtatgcctccctccaacttcttttccaactgagattggagtatggcaaaggaaatgaagcatgaagggaaaactaggagctatgataatctaagattcataaacaattataacattatttgctcacttttgattgtgcaaatgactaaatcttttaatgaagcataatgacccatctgacacatatataacaacacataataaaagataaaattaaatttgtcaaagcaatatagaccacccactactagtagattatgtttgggtttggattttcatatattttatccatatctgtttccttctattgggactttatggaggcattactcatgaactttggcagatcttttttggtgtgtctgaaagaaaatcccaaagctggttactaagatgtttgaaagtcatattcttcttcaaaccgtgtagaaataactatcaggaaataagtggttataattttaaaatggcatgtttagggaagagaatatataagtttgaaaaaccgcagtctcctccaatacatttctacctattactaacagggtcaaaattgtctacagaaaacaacctgatctcaatttcctcagacaattcagctagtaaaatggtgtgactgacctagagttacggagataactcctactgctgagctctctcaacaagtgacaccctggttgacaaacaatcacacattatttattaaacttctatttaataacaggagttatggagttagcaatgttaagtgaagagtccttgttttcaaactttgcaaattacagttagtaactaataaactaattaatgtcctttatgaagagatgctcagtgatggcctgaaaaatccctaaaggagatagggagagaattgaagtatggaataaaatgacctatatgggaccttcaaacttggagttttctatattttcaaaaattacttttgctgtcatttaatgtccaaatccaatcccttgtctagggaaccagttcagattaaacaaaatttcaaaaatacacaagcaatcaatatctaattcatttaagtcctgtttcttcccaggactgctgggtataagcctagagttgcctgccatttctcttatattcaaacactttgggaaaggagccatttttttagatctattttctccctgaagcttgggagctatatctatataaaatgagatgacatactagggctagcgtactaaaaccttttctaagagaatcaatatagctttgagaagcctcatttatatttaaaggagaaaagagacataagtagaagtggacataacgtatcatgtagacattgaaaaataccagaaatgatttaaaagtgactgcgtgttctcatattcccagtgccttgtaatttgacttggagggatgttctagatctccattgaatgtgctcactgagatttgtctttgtcgtattgattacaatcatctgtcaatgccctcaatattttctgtactgaccaacagcgacacagatcataggctgtaactagtacaggctgtgccaatgaaacaatagggctaattagcagacatgaaaatgaatcactgatttaattttcctcctggtctaatcaacacaatgtgtcagctaaatattttgatccattatttcaagtgaatagaatgtgcttttatattatcatttcaatttcattaccttgaatattggaatttttgatttttggatacatcagtgtccagtcagtatccagtgatttttagatacattttggatacatcagccttagcatacatcagtgcctacgggtataaggcactgatatgttaataaacatattaacagtttgtaagccaatgaaacctataattattgcataatttaaattaacttgtgtacaaaatgccataatatttccacatacgtggtggctttcaaaatcaaaataaggtgagcctatttcaatttatgacagacaattgtatatctcctctcttttctttgccaaagaagccctttatttcatcctcacaggtgttatacttgtctcctttctgcttggtgaaacaatcacggtttgtaatttcactttctgaccatcaaatacgataaaatgaaacagtttgtgcttttcttgtactttccgctatcaggggttactggttgagagagctcagcagtaggagttatctccgtaactctaggtcagtcatgccattttaataggtgaattgtctgaggaaattgagatcaggctgttttctgtaggcaagtttgatcctgttggtaacaggtagaaaatgtattggaggagactgaggtttttcaaacctacatattctcttccctaaacatgccactggctggctgggatgctaccttataaatgtgaggtagatgacaccagtctgtaactctagacttctgtcatggatagcaggataacttagactgagagctgtctgtcttcccagcccacatggccacaggatcagagcaggtcatggtgaagcagaggagaaacagctgcaaagcagagaagaaagtccaatagggtaggatgtgatgaataatgttgtgaaacagacagctagtgccagtaaggctcctatatcatagaagtctaggaagatacaagcaagtgctgtcatagacagataaatgaagtggacaytgttttgagacaaaagcaagctggcaatatcagagaagcttactataaagagcaaaatgctgggtgcactggctcatgcctgtaattccagcagtttgggaggccaaggcaggaagattacttgagctcaggagttctagaccagcctggtgagacctttatctctacaaaaataaaattaaaaactacctgggcatgatggtgcaggcctgtagtcccagctacttgggaggctgaggcaggaggatcgattgagcctgggaggtctaggctgcagtgagccatgacagcaccactgagccttggtgacagagcaagaccctgtatcaaaaacaataacaaaacacagcaaggaccctattactctcaatgggaaaaatcgcagttgcttttgggccagcctaataataacttgacagagagaattttattccctgcaagctacgagttcgttttctttaacagatgaggtaactgagccacataaaaattaagttacttgtctagagacacccagctgataagtaagagagcagacatttctactcaagcaatctgactccaaagctcatggtgatgaagcaggtcatgaaagctctctttatgacacatttgaataaagcagcatgacagtgggacaaaaagtacacaagacaaaagctccatcgttagggccaaagcataggaacaaactcaggccagtgatggagcaacttcagctgagattttagccaagagcttgttaacatctttccagttcccagatagaattagtcctaaggaattacgaacattgtattccatggyatatatatatatactacattttctttatcctctaatcaactggtgatggacactgaggttggtttcatatacaagagcagatgtcttttatttttttttttttgagacagagtctcactctgtcacccaggctgaagtgcagtggtgtgatctcagctcacggcaatgtctgcctcctaggttcaagcgattctcctgcctcagcttcctgaatagctgggattacaggtgcacaccaccatacccaggtaatttttgtattttcagtagagatggagtttcaccatgttggccaggctggtcttgaattcccaacctcatgtgatccacccgccttggcctctcaaagtgctgggattacaggtgtgagccactgcacccagccagatgtcttttttaatatgatgatttattttcttttggataaatacccagtagtggtattgctaggtcaatggtagctctatttttagttccttgagatatcttcatactgttttctatacgggttgaaccaatccatattcccaacagtgtataaatgttctcttttctccacatcaacatctgttgttttttgactttttaataatagctattctgactggtataagaggtatctcatgtggctttaaattgcatttccatgaaaaagaatgaaatcaygtcctttgcagcaacatggatggagctgggaaccattatcctatgtgaaataattaagaagcagaaaatcaaatatctcatgtattcatttataagtgggagctaaacaatgagcacatatgcacataaagatggaaataatagatactggagacaacaaaaatggggagrgagagaaagctgaggattgaaagatgatctattggataaaatcttaattatttgagtgtatacggagagcccaatcttcaccattacacaatacacccatgtaacaaacatgcacatgtactccctgaaactaaaaaaaaaagaaacaagcattgtgaactgctggatccccaagaaaggcagatgaccataactaggaagaaaaggagaaaaaatgtgcaatgtcaagaaacatttttgtaacttatggtcaatcttgtgtttctgcaactcacctacatcttaccatgtagaaatttagggatacaaaccacaaagattctgagggcctaatcatctctcctagacttgcttttgcattctggagtaataatctggaaaagcaataagagtagggacatatttatgattattcttaaaactgtgtgtagaaaaatacaagaatatctactccaaaaacctgcatgaagacatttgatagttagccaaaattcaagagactcctaatctttgaaagctacacattaggctggtgtatatgtcccattatttgaaattgcacctttatatatttgagacatttatcctattatccctaattacaatttccccactacaattcactgcacagtgcttccttagggagctgcttaatacatttcaatcttagaaggtcaagattccctcagccaattccaaactgcattgtcccattgaatagatgtggcacattctggatctagtgagaataacctatgtatattactttgaagtaatacaggtaggccattatagcagaaagaagttgagtaaatgttgatatttaagaaggttcataaaatatttgaacacaactgcaatccatacccaattctcagtggttttttttatagaccatgaaatcatagctaaagtcaacttcggttctgccctaacggagagccacaaataaccctaaaccatagataactcaaatgcatttttacttggcttttgactgctttttatgataattttcacagcacattgctcttctaattatgttttgtttgggatcatattaaaattaacttgtatttagtgattatgtgctacctgatgagttaaagaggagccctgggagtgtattgaaaaaccaggctgtggatggccttcagtactttacacaaagaaaagccaaatagttaaaaaggcattaaaaatggaaaggatgtaactagtgggcaaatagctccaggacctcagttgcatgaacttagtatatctctttcctcctccttctcccctccctcctccacgccctctttctcctagtctctatttccccttttccttatcctcttcctccatcttttttattctttcttggaggcatggaaagcaactcaaaagaaaaggagacctctatagtacatccgcactcagccttggatagtgagaagtactcaggtctgagtagcctcagacagtggagtcagaagcaagatgaactgtcagggattataataggaatggtcagggctgaaagcaaggcaataggtcaaaacctggcaacaaggaaagagccctggataagtagtttccataaatccaagcaagacaatttgttaaggcttagcatgcaatcaggcatccaaaattccatgaaaaccagaaggcagggtgaggaaggaacaggaaccaggcagcagttctgtgcagtggcaccaagtgacagcaagaaggcagcagtactaccaaggcaagattacacccagccaaaaaaccaccagtctgcagggcagccaattgayactccaggcagagccattcagagctgaagagaaagcactaaaaaaaagtgcagccacttctgtgattaaagacaatgcccatggtactaaagtaccgtcttggagacactggtcatagttgttaaagcttccagccctcccagagaacatctctatgaaaaaaatactggtacagcagccccaggcccaccttctggaggttcagcttttaattttagttgtttcaagtgctgtggaaaagactagacctgatccctcagttcttcatattgccttatgaacactggccagaagggaagcacatccctcccttttgttaatttcctccaatattgctaagacaaggaatttcaaaatgttcaacaaatattaagaaacaaaaaagaaatgaataaagaaaataagatgggcaaaaataagtatgcatgcaaaaataagtatgcatgaaacataagttttcaaatatcatacactgacattgattaatcatcactagctgtcaggagagagtgctgtattgagaaggatttagcaacccagaatgtcctaactggcttggctcatgtctgctgtgggtaaaggaaaagcagggagtgctgacaagtctgctttgtatttgccaccctttgcaaataggtactcaccctattcccaaagagctaatataaattacatatcactttatttgtgtttgatttattacataattattattagaataattcacataattataaccagaagccccaaaagagcagagaccctgactgatttgttccatggatacctccagcatctagaacaggacatgacatatagtaccccttcaaccagtagttgcctgacttttctgccctcatttaatggatcctgtctctgaacctgcaggcatcatcatatactatcgtaagtgatttccttagcttcctaaacccagraagaatccacattctatttctcatggtttttttctatctgtatagcagcatcaaagtgggccctggtttttagtttgagggatatgccacttctgcaaccagctggcataaatgtggcaattgacacgataagagaagctgttctcccagccagggaagaggcattaccaattacaggcctatactataactgtgcctttaacatcacttgcatgtaagaatgcaggtctctatgttagaagagtgatatctgctcacagcatctcatctcctcctcagctctcccagcatttgagcgctctctccgcttcgttttcaaccatggtagtctaatcactggcaaaccaccagtgagttgattgcagccctttataattcctgtgtagtgagatgccataatgacttttccaggagtttccacatcatctgtttactccatgtgacattccttccatctgtctactttcagtttattttactttattttttagtaacttcatatcgcagatgaaagtactgtgaagtttcttctcaaaaccataatatttttgttacgttgcatgataacctcaggaaacatgaaattctaagaatttaatactaatatcattttgggatcattttttaaagcagtaaaagactttatgttcatgttgtctcacttttcagaggaattcatagctttttattgatgtaagccatttcataaccctgtcaaggtgctttgaggaagaagttaactgattgaacatcaacaaatcctggaatgtttgatactaatgatctcagaaggggccctgcctgatctacattccacctgagcactccttaccaaatattgctcttgccttcctctgcagtgattggttctgatcactgtagagaaagcatggaagctcattttacaaggctgcatgtgtgtctggctgctacctagatgcatgtccttcttgcacaggtcaatccattctctggtttttctctcctttgctctactcccttacacagaaacctaatttacctgtttctttcttaagctcttcatttcagaaaaactcaataaggaaaattaaaaaacccctcctttaggatgtctctcttatttctgccagctttttgaagtatgtgtgctctgggcaggggtggggacaggaagtgtatgtgacaaagatcagtcagacaaaacactcctggcatgatttccattttagagttgtgaaactgaagaatgggcaggtaaactgatattttctataagttgtgagaccatgattcactgatttgtttaccttaatgaagcatacgtaaaataattgataaattattttatcaataatttggtaatttcctcttggggctaattgaatatagtgagtataattgagtatacggtgggtggctttcaagcgtatctttccaactttcactattttagtaccctggctagaaaatgataatctgatagtgaaaatattaattcatcctctacaaggttctgaagatactaacttctcagtaaattcagatatagattacaaccattttcaggatataataaagaaggactaaaggtatctctttggtatgtggttctttacggccacataaatggcttccaagtcttcatttccttaagttcatttcctgctaccctatggacattgctaccctctccttctctgggttacaaataaatggttgatggcattttaataacaaagattaaccaggttgccatgttaaggatagatgggagaagcagtttgggaaggtagcctagacaaggtgatggtcttttcaggaagttctcaggtgtctacaataggtagcagaattgggcctgagcaaaagtcacatgagcttacagcaccctgtgcagtcaaactctcaacttcacttaagctttttctttgctttgcttctgcccactcacctggcctgttaccacccactgttttaagcagctcttcagctgcacatctactgtcctgctctgccctgaaataggatgataggtaggactgctgtacccacagtttacatgtccttaccctccatgtaaactgtgggtacagcatttgctacctaccgtgcttctcaaataccggaagcatggtttggacagctgaaggcttagcaatcattccaagctgcagcatctccttgggcctcaggctaacacccatatcaaaacaacttgcgcggtggcgggcgcctgtagtcccagctactcgggaggctgaggcaggagaatggcgtgaacccgggaggcggagcttgcagtgagccgagatggcaccactgcactccagcctgggcaacagagtgagactccgtcccaaaagaaaaaaaaaaattatgatatttaaagagcatatttaaccattaaaatagtaaatatgttgcttattttttttcttaattgaactgtagtgtccttattgttttaagacttcatcgtatattctggatacaattcctttatcatatatgtgatctgtatgcattttttccaagtctggcttttcattgtctcaactgtgtctttcaaagagcaaaaattcttaattttgatgaagtctgacttatcagttttctttttagtcaattttgcttttgctgtagtagctaggaaatctttgcctaacacagtcataaatattttcattttttacattttgtgtttaggtctcccgtgcattttaagttaatatttttacatggtgcaaggtgtatggattaaggtttgagaacagacagacaggaatgtctttcagatttataaaacgtaaatgctatatagttaagcatttaataatcttttctgaaaaggaaaaaaaaatgcctacatttgaaaccattctggaaaatgtaagataatgtggttttcctaaccaacagtagtcagcttttaaatgcagtactttgactttattatcttatcattgagattcaccatgtttttatgtaccactaagaaagaaaaagaaaaaaactgattaaattgtttaaaaaaaaacaaaaaccttgaagacaattttagttacctccaggctaatcatttcctttttcttttctttcatcgcccctgaaactcccccaagcattatccaaggtgtgggctctttttggttagtaaacttcacttgtcatctcctttgagtgtgcttccccactctcgtcatcttctgctggcttaactcgaagcccaaatttcttacttgtagatggttaacaaatattccacattctctgcattttcttcctgcatttggaacctgggtttcctttaaggacaccaactccttgaagtcacactccccctttctcgcacgcatacacacatgctcagacaatgagggtggctatctggcagcttccacctttcccactagagttttcaaatatttgccacactatgccagtgccaaaatttatataataatctatccttcagaggcttctccccttgagctgctcacaatttacccctccttctaactcacaaggagttacaaggccctggaawtgtgcctccctcgacagccacaagtgaaatagtcaccaggttcatggtcttactcgaatccctgtcatgcagggatttcttcatttgcttggaatgactcatcaaacagcctagctttacagttccttgacctcggctcttcccaggacttttatctccatatgtcgacaggaatctactttcttggcacttgttactaactggaactgtatctattatcctttctcaacaagaacctctcatatctcagcatccttctaaggctcgcttactatttcacctcttctgtacttctaactttgagccttttattcccttcctatttgcaagcttcctaggcttcatttttaggaccccaatgttgatcacttgaatttccctttcaccagctcactgactctcttggcctttcaactcatcctttttacaaacccctggagcaggtctctcatcgcccttcaccactcctgcagccagtcagaacagctggtcaaatgaatacaggaatggactcactcattcataccaacggtgttcacttgacctgccataacagtgtgattctacaggccctgcaagttcatgctgactgtatatctcactcttctgcctcagagctagagaaaacaacactgaaaatgaccaaacctcctaatcaggaactggtaaattaaactgtttaaaaaagttctctttatatgtgtacatacataatatataacttcacagaagtgagcaaaagtgattacactgtatgtataaatttatggggagaaatgtagcatctgaattcttttcctttttggtttagtttccagttcccctcttcccattctccacaccaacatcatccctcacctcataaacctacacctagaaaaactatgtcaataatctagaatgtatctgggattttttcccaagttcatatgcttaaaaatatatacacactcatacatataccatcatatacttataaacacacaagcatactgtggatatacaggcttttgggctttgttttaaaagatgagatcataatatacacatcttctgtttcttgcttttgtcattagatatcttgtagatatcactctagatgaaaaggttctaactatttttagatctaattattaacttgttcctttgtataaactcgtaaatatttattgagcacctaccatatgccacactgaagcctgggatttattcaaatttcagaattgagaagggagtagagagattcatagtccagctctcttacagaatagatggaaaatcaaggctccgtaaatattcgtgatttattcaaagtcatgcagccagttgatgccatgtctcaaatcaaaatctagctcttgctagcccccaagtccagtcctcttttaatcatactattcagagtcccataaattagcatacaattacttacaatttaatgtgaaaacatactacaacataagataaatcttcaggcctggagtagggagaggatagggaggggcaaggattcaggaaatttcctgataatggtttgttgtctgtgtggatagaccaaattgtctttaatgaaccaaatttatcaaccagtgaagactcattaagatgcccagcatttaaagggagatcaataaaagagagaacttagtattgaaaagctatgaaagagctttgaatgaaattcactctccgtcttagcagagcgcttttcaagagtgagaatcatgggtgggctgtgagggaagatattccctggccatctaagcacatctggaaaggtccagatttcaaactgtcgctcttttgtcagtgctgaaaaacttaaccttgagcgctaggaagatgttctccaagatgctgaaacttgtcacgttatatgagtcttcatgttcataggcaaaacaaaacaaaacaacaggcatatacatgacattaccttcttttttgtttgagacagggactcgctgtgtcacccaggctggtgtgccatgatcctatcatggttcatttctgcctccaactcctgggctcaagtggtcctcccacctcagcctcccaagtagctggaactacaggtgcactaccctgcctggctaatttttttctttaaattttctgtagagatagtatttacctatgttgcccaagctgatctcagactcctggcctcaagtgatcctcctcccacctggtatgaagcactgtgcctggccttgaatttcttaatgatgtttttgtgaatctatttgtcaagagtacaactgccagatttttgtgcatttgtgcccctctgctccgaagtacccygactgtcagtctattcattcagtcatcaaataactttggggcatctattctatgccaggcactactatggtaggccttcaataaagggaggctatgtttacatgggccttccacttcacaggcaagaaccgcactactgaatctcccgtgtctttgtccctccagataatttagtgtgcaccttatgaccttcactgacaaaatagcgaagaatgaacaaatgttccttaaagccagctaattctttggttattttaaagctgattggatcttttgtacacattctaaagactctaaagagagtccttgaaggcataatttcactgaaagacatgcaccacaaaccccctgaggcatccaactgcagggaacacctcagctcagtcagtatgtgatgagctttcatgtcgcagggcacctgacagttggatgaaaaattgctttcagtctgtgctgggttttctgtggcagttcagaagcaggactaggttctgggtctttactgtgtatgtcatcttttctttcagggttctgtgtttccatgcaaataattataatagtgtagaattatttgatacctactaagtgtcagatttcctgccatgtacttcacagacttttattctgtacaacaacattatgagtcatgtaatatcatccccacttcagaaagaaggttcggagaggtggggtaagttacacaatgacagaactacaagaggcagagcaggggtgaagctcagatccccgtgtctccaaacccaaggctgaaaccgctggctgcactaccccacacagttctgaggcagaagagaatcaggaggtgaggatgggaactggggaaggggttatgttctgatgagttagtttttaaaggagagccagattttctgaagcagaattttaaacatgaataggacatgttaacttgatgttagtgaaatatttcctagagttggggtttattgttgaatactaaactcatgggagtactgcataccactgtggaaaggtgaacagaatgactttagggaatgtgacagtttacaaagaaaaaagtaaagaaaggaaggaaaactagaattctcagtcctgaccaaaactatctctaggataattatggtttatctaaaacttgtttctctgggtaatcagataaccctgctctctgtgagtgtagacttctccacatgctgtatgaggatacctctgtgtccctgtagttaacaattttaattataggtgaagtattcaggttaagtggcctaaattgacactttacatggagaaaaaagtctctcatgagactatatgctataaatacataattattcatatttaaactcaacattctattgcttttatatttgttttatattcatttttcacaaagtttcctttgcaattgattcctgggtgatggtattaacatgtcagtattatttattcaagacaagtggaaaatctcaagaaaaggctaaaagacccttgggagcttacctagtgactacaacagaactaggaattaaatggctgtaaagtgacatgttgtatacaacacaacataatttattatgtgttgcattaatatagacgttttgaggatatcaacattagctgaggaatcctgatgtctgccaattaccattgtttggtaaaagattgggagttctggatttaactgcttggtaatgaaatcaacggtttgcttcaagttaatgttatacagtagatgcctagctgatttcttgtttcccctactatctaccttaaacgcattctgggtctcccttcatctttgtaggtttctgagctatttttgtactgtctacatatcttgattagctaatctgtatattaaccatacgttctgacaagagttcagtgacatggaccctcagcccatgacgctcactaccactgacatgttgcatgtgagtggtggggggagatgaaattagtttattataatatgacttttgagaagatatagcaaaataatcctctaatccattctacagaaaaccttttgtttttccaactttattacctttcattattccatctcagctgttttcactttgtgagattgctagggtcaatgggtgaggatctgccatgggtgtgtgtgtgtgtgtatgtgtgtgtgtacttttcactgtcaattattctaagaaaagcaaatgctaaagtgaagtgaaacagacaatggttcacagtaaatatcaagctgtgtttgtattgctgccatctctttgggagaatttcttatctgttcctacagaaaaattactggaaatatatatcaatgaaaacgtataaatgaaatcctgaaactatataagattcatatctcttgattatccaaaatagagacatattattacttatgaagatgaaatgtttgtggtttgatgctaaaacatttagtactaataattattccatatacagtgttcgcattaatctcgactacactaattcagagcatgagctctttgcctttgtgcatgaagacagtttcttgggcaaattaccaatgtaatttcctcgttgtcattccgcaaaccatctatgttcaaatattttaaaagcagctgtacagaaccaaataatttatattttaattctatataaatcaacatatacttctttacttggacattaccattttaacttcaaattcaacatgtctattttgaaacccttgatttccaggataaatcagtctcttgctgacttcccttctcttttgtttgtggtagaatgattcccctaatgttggagccttaaagtctaacttagtgactcctctcatgttttccatatctagtctggggcaacatccagaaattcttcctgttctgtttttcaactatctttttagttttatttctagtgccgccatctcagacctctactaattcattggaattatttttcatctctctgtctaccatttttttcttcttccaattcatcctatgcatcaatgtcactctattttttcatatctgcaaaccactcagtggacatccaatatacaagcaaaccaattataggtgaaatttaaaaatatttattgtaatttataaaagaatagtaaactaaaaatgaatggtaataacagcaattataataatggaaaacaactatgatgctaattaggaggaggaagaatgttttcaaagtctttcaccaggtatcgatattcatctcaaagagtttgaacaacagattcaattctgtgtagggaccatttcttcatttattctttattcctactaaatcagaaataccaaattcataagtcatttggaagggtaacaaatgtttgatggtttgtcaactagtcttgacaaacggattctacaatgtacagaaattatggagacagttttcactgatagatgttcagtgcctcaaaggaaactcattaagatgagggaatgccctctcaaatgtaacaggattgttgaatayatcaacacaaaagatcactagcaaatggattcctaatgaattcctggttgaatttgcctctgataattatgtattcatattcagtttgagcattcagatgtgttaaatatggccaataatagcactgatttatttcctcctttaatttagaatatctttaagtagttagaaggaaacccttgttaactaatccattgacatcaaaatttaactttttaaggaacttttgctgtctctcactaaatattagaaatgatgatatgttgttcatgaagtcataaagtcaggcttctccactctctgtttgatttttatgtgtatgtgctgctcataaaaatcatcacactggtagagattcttgttctcacaatgcagattcacagtgtattttctccctgaaaacttgttattttctttggaaactttatgccaaatgatatataatttgcagtactattttcatgtctttctacttttacatctccgatggattaatgttgcagcattaattcattttgtgtgagttggtactctaaaatacaataaggcagacagctttaaacccatgtgatgtttaatatcctacaaagaccaaagagtcatagtggatatttccctcaatctaaaaataagggaaaatactaataagcaaattatgtaaaaatgaatctgcttaaatagacagcaccctgtttgccagatgttacctgagacaaccaatccatatatcccatgtatgtgagatgtttaaaaatgtaagaattactaaggacatgataaatttttatgagaatcataattaatcatatagttcaaatttcatggtgcctgtctattgccaacccctagtttttcacaggtttcacattggaaagcaatgggttgtcctttggcttattttattttagtaattaactgtcctttaaaaacaataaaactttcagccttcagtgactttgataacctatgtgataaagtcagaactcattagcctgatattcaaggtcttcccagagaggctccatcttacctgctctgacttctgtcttatacctgctgatccacctggggtgtctgctgaaagcaggtcagcacaatgactcagattcttccctttctttccctctcccatgccccaggatttgtttgtacaactggcccaggaatcctgacttcatttattctctatgggttaacccaggttcttgcttgtgaatggaaacaggataatggagctaaacctaaatggcattttctaaccatgtcttcattattcattctctgaaccatcctctctaatcagtttttactgatttcttccccaaatatgcatttgctttctcatttcaacttatatttacactgttctattcatcagaaatgtccctgtcttgtctgcctcatcaaattcttcaactcccaactcctgtcttacttcctatataaaatcttattaggttaccttagctgaactatcttcttctttctggaattcctattgcaattacttttgttgtaattatttaggcagtggtttctttgatatcatttactgtgttttctggcaattgcactgaaattgtatactgctcttcaattaatgattatctatttccccaaactagattttaagcaccttgaggacaaatattgcctcatatgcctgtatttctgttccaggtctttggcatactgttaataatgaacaaatattatattacagtaaaactgtatcccaagattttctcagactcatctaaaatataggcaagaacttaataacactaatatgcctgttcaatgaagcattctattcaaaatgttttattaattctttacagcttcctcagcatctgattggaatcagtggcattttaatttatatgtctatttaacaaatactaatatagtgtgcactgtgtgttactcattttctatgcactttacaaataataattttatttaactttcaagacaaccatctgaaataggtgctattattatccctgttttatgtatgaggaaatggatttactgagaagtaactcagccaaggtgatggaattagttactaataggttcaggatttgaacctacatttttaaccactgtgctctaggaacttagttaacagctttaatgaatgaaatggttctgctaattgatgtaagaaactacttacatgttttgttggctaggtcacctgtcactctcagttcagaatctttcaggaaatgtcctttagtctctggtgggaggtgtactgcaactaaccgtcctttgaatttatgttgccatgtacagtccctgtaattttatttcctctttctatctttacttttgggatctaagcttccttgaatgtttagcctttttgtctttttagaaaatattgttccctttatgaatatgtctcttaattgctagagtttcctaatagccaaatgaaaattacattttggcttagaaaatgctttcatctgtatccactggctatatatctgcaaccaaagtaaagtgtggaattgggtatttgttgtttgcagcatttgagcagtgtacacatcaaatgtggttaattctattaccagtaatatttctagtttcttctaaaattaccataaaggtttaggtctagattagataattatttccaatcaatctcctttcaagttggaaatgaatgaagtcccatgttttctgtgtgctatttcatatattttggcatgataattattaatagcaatgtattactattgctcttttgcttacttaaaagtatattttgcagtggtttattttattctaggtgggagaataacacgttgatatcttcttgaaataaaaattatatgtcaatgaatgtgacaatgttctatgtaagtagcaatcgaggaatgactgaaaagggattattaaatatttcaatgcatgggaaaatatttcttctacctatttactgcctaaagtaaatgctaacccagaagatatttatgtcttggtttagaaatctgtagagtgacagagcaatctgagctctgtaatgtatgcaaaatttatcaggctcagagagacatgagtatgggactttggccacataccatacctgtgcccagggacaactgttaggaaacattttgttccagactagttgtgtcacctattatcttcatgttcctggaatttgtgatacaaagaacaatgtatagccaatcgatagcttatgtatttgaatgtatattcttggtaaacaacttaggaactgcctcttgtttttttcctaaaaaaagccacttgtaatggctggtagttggagtgtataatcagagcaacttgaatctacgctcctgagtggccatcttcaacaatcaccctggaataaactctttttaaactagaaaacaaaaacaaaggaaacaacaaaaaagaagaaatctatagagtgaactatatttttccaccttgcaaatagaaggggcaaaaatcaaccttgcctatctgatgatttagtgtcatagggattccaaaatgttatttgtaacgtgtaccttgatatgctaatggtgaaatctcctgtttcttgatttggtcttctcatcttacatttcttacctcaaatccattctgcgacttcaccagcagattaatattctttcctggtctcttggaattttaataaaaacagcatggtcatggggtttcatgaagcttgcagccctctgggggatgcagataataatcaatcaatctcataattaaatgtaattttaaataagagcttacaaaaaaaaaggaatatggtgataatagagcctagacaaagggatattacccagttagtagatgtgtatatgctgggcaaagggattgatatttaaataatgtacaggagtcatctaatcaaaatggtagaggtggtgggtgaggaaggatcttttgtgaaaatggaacaacatgtataaatatataccatgatgggcaggagcacagagattttgagaaaataaagctgtggtcgcagtcacagctcaaggagacagtgggagaagggaattcggtgaactggtaaaggtggcaggatcatttggtacctcataggctctgattaagattcttcctatatctttagagctgttgaaactcactggagtcttcaacaactgagtgacaggattagatttgaaaagatcattcttgctatggtgtagagaatagtcattcttagatcattcttgctaaatcttccatgagaaagtgagtaacatagatttgaaaagatcattcttgctataatgtatgaaacagttgggaagaaggtaagttatgggaagaccatttgaaggctatcacaaagagaaattctgatcatttagattaggtgatggagagaaaggatgaggaacccagaagatagtgggaattaccaaggcagagatgtggataatacagtccatgactatagaacaggaagtgctgaaagagcatgtttctgcacatttagaattaagagggatttggagcatctggagcagaatttgtttgttgggaatgatgactcgggagaggcaggtaggggccaaattatgaaggtccatttttgtgatgtgatggcaaaaggaacaactgaataaattgagcagggaatcacagtcagatgtggagtccagagaagtctctgatggtgtggaggatgctccacatctctcatgaaattaattgagaaactgctatttttttcatctaagagttttaattatctttcatttagttcccagaggctattgggcataggcacctagtaagtaactgttaataacaacatgcttattttgggcatggcaatgtggaaatttattcctgccgagtaatcagtgccagttttatgctggcagggttttaaaagaatggagaagggattcttttgcctccattaggagaaagctgtgccttctcttcatcatatagtgactcattcaaggttggcacaaagtaactttaatcaattaatgtgaataatatcatacctttttaagcctaaaatggatattagaggctatcagccccctggaaaaaagtctgcagaatatttttctttcaatgataatgtcatatatatcatagcccttgaatctttccaaaacatttagtcaatactgaaaacatccctagagagacactcatccaatttctcacatgtgaatcttttatctatctttggaaaattttaagaagtgcttaatttcagactgcttttataaaggacataactagtagcatggtaaaagtgcagtccatgaaattaaattcctgatctgaacctcaggtcaattaacttctaaaaatactctttttgagacaggatctcactctgttgcccagactagagtgcagtggtgtgtgattatggctcactgcagcctcaacctcccaggttcaagtgatcctcctacctcagcctccagagtaactgagactacaggagtatgccaccaaacctatctatttttttaaatttttttgcagaaatgggatcttgctatgtttcccaggctagtctcaaactccagggctcatgtgatgtgctctgctgggtgctatactgggctgacaatggtgaataacatctaattcttctccaaagagagcgctcttcaactgatgagggaaataaacaggagagcaggcagtgaatgatagagcagtatcagaggtgctaggttgaggatcttcacaagcttctaagtcaggacatcctaattcaaaccaggaaggatcaaagaagacagtaaagataatgaccacaagttgagtcttgctataagctgaatctggaagatagaagtgaaattgtccatgaaaaaggaagaaagaagaatgtcgaagaccaaaggggaaagagagtaagacaaggtaaatcaccttttgatatcgttgctgagttgtgtgaaaggctgtcaaagtgggcagaagtcatgttcagaagagttttacattcaaattaaggagtctctgttagacagctttaaatccatgtgtctaatatcttacaaagaccaaagactcatagtggatatttccctctatctaaaaataataaacttttctttccaaagggaaaaatttttacttatgaaaaatgtggtaaaatatagaataggaaattctgaaagatacaagttcttcttgaacaatgagcaatgtaaaaatgataaaattattgcatgatacaatcttttttaaaaaagagaaaacactgagcatcttttccttaagccccctttcataaaatctcatattwtgcccacttctccatcttaatgattgtggatttctttctcaagacctacttaatacatctcagttggaatttcgaaatgctggcaagtctttaaaaatagacagatgatgaccctaagacatttggaacttatcctaaaggctgaggcacagtagagaaaatatattgaataatatacaattttggtcaggaaatgaggaactgctaggttagaggccccattttctgtgtctggacactggagagaatgcttgtgtttggtcctccaattaagagctgcatgatgcctgtgccctgcaatgccaacacttattgggaacccataacctttgcttctccaacttctccagccaagattatgatgaaaaaagaggcaaaccacaattgccaagtctgttctcagcaattcgttcactggtctttcatcattaggcacattgcccctgtgtacctttggtcccaacgcataaagggatcttgcattgtaagcacatcatatgtttatttaaagaattttgaatctttgcagctcttattgactgttcagcagtgaaattagctgttgaaaagcatttgcactgggggtcgtttctggaaagaaaagaagtatttcttaccttcttctctaagactgcacattccttgggggtttacccatttgagactgcaagaagatgaaataactcacttttctctattaaaaggtgatctcaattgctatagagagaagaaataaacaattattaatattcctgtgtcagagagtgtttataaaagcaaactgtgaggttcgtaatctktttttagacaagaaaaagatttaaagaatgacttaaagtgatgattataagaaaataaggagaaaaaggagagagaggagaggttaataggtaggggaaattgattctagaccaagcacttaagaattctagttctatgtttgatttcctttttatacatcttgcactttgctctaaagcaaaggagttacaaaatttttaggcaaaattttctacccatgattagcgagcatttatagaaagaagcaataagttctttcagttgaatacacccagtacctctaaaaattaatgtaaagagcacatttcatggtcactaaaagaagggtgcaatttaatgtatgatgttaccatttattactaagaggacctgatacacaaaaatataaattactttttccatatcttctttcagcttcaaatgattttgattttttttttactttagatactcagagtagaatttataaagacatttggggagtatttctacctcaaaggaaaacaaaaatataatgacatttaaccatttcagatatttcatgatatgtagttagttttgtgtatgtttctactacattaaaatatccaatttattggttgtcttgaaaggcttttgttttctgcagagattggatttccaaatatattaaaataattgcagtatttatattgtccgttcttaggggctgtacttatattgcatttctttgcagagttattgatgatgtatccttgttctgcagtatggcacttggcaaaacattgcttcctagtttgaactctccaatgtaaccttcagggggaaatggttctagaataccattgcatcaactcttttagcaaattgcattattagacatccatttataacttatcctctaagtgatctcagtcgaatcatttgctgtcttggtttcacttctatgaaatattctagagcaaatgctgcccttgcttgtgtcataggactgcagtgttggatgccttctgtgaagttcatttagcccctcataatatgcattccatgtaactaggagggaattttctttgggtagatttctcagataagttgtagggggtggtgtgactggctaaagtacatcagtaagagatcattggcttgtgaggagtgcaaaaggcaggcagacaaggggaagaggaagtggaagaagccctacacatattgagcaccagtccacaccacactccccatgaagcacttttcatacattgcctcatgtagactttgagatgactctgaaatctgggtgttattagaggccagagatctcaaaaaacttgctctagacacttcatacaaccggtaaagggtagaattggcatttgacacaaatttgactgcctcctaaacttaatacattttctgcaaagttattggagacaatggagcatgaaatatttcttagtttcaggggttgaagtatcatctgcacttagttttcttctcaaataagataaactctaaacaacaataagaaaagtagatttgtgagttttgtacgaattggccagctattaatatcatttggcattctaaaggaagaacggctgaagtaaaccacaggtgcagatcaaatcttgatgtctgtttcactgcaggagacaaatagaatctctctttcttgtatgcttctgttatgttgagtctaaatctgaggtaatcatgatcatttcaacctgaggtatggtttactaaattaggagaaacatacaaaagtttgttgacttttaaactaaagaaggcaaaagccataagtgaaacaattcaagtagagtgctataatgtgactgtttctaatgacaacttgaattgattgtaaaataagtctggcagttaaaatgtattagtgttggctgagcatggtggctcacgcctataatcctagcaccttgggaggctgaggcgggcagatcatgaggtcaagagattgagaccatcctggccagcatggtgaaaccccgcctttactacagatacaaaaattagctgggcatggtggaggctgtgcttgtagtcccagctacttgggaggctgaggcagaagaattgcttgaatccaggaggcagaggttgtagtgaggtgagatcacgccactgcactccagtctggtgacagagtgagactgtctcaaaaaaaaaaaaaaaaacatatatgtgtgtgtgtgtgtgtgtgtgtgtgtgtgtgtgtgtgtgtgtgaaattatgacagaatttacctgtaaggtgttagtcatggaatactatgcagccataaaaaagaatgaaatcatgtcctttgtagcaacatggacgcagctggaggccattaccctcagtaaattgaggcagaaaaagaaaaccagataccacatgttctcacttacaagtgagagctgaactgagtatgcatgtacacaaagaagagagcaatagacactgaggcctacctgaggatggaggttgggaggaggatgagaatcaaaaaagctacctatccggtactatgctctctacctgcctgatgaaataatttgtataaccaaaccccagcaacatgcaatttacccatgtaacaaacctgcacatgtgcccctgaacctaaaagttggaaggaaaaaaaagggatagatgttagattattccaacctcagcattttaaataacctctatgactttcttagataagtaatagtaataccaaaataattagagagtggtagagttccatcaccaggtctttaccctcattttaggaataggttaaggcatcaagagataacgtaattaataaaggattatgctgtgatctgaaacacaagtacagtatttgtatttctgagctaagactaaagtccagatttctttcatttcggtgcttgttcgtttataccacactgccccaaaggacactaactgtaatagtactttgtcctgacatttaggacgcactcacacccttttgtccagatgtttctgtcttagatttccttactaaacactaggattgtgaaacctttcctttcctttctagggacaaaatggtattcactggcatatctagtttaatgctttgcgtacagggtgtgccacagacaattgggttaatggttgtaactggttaattgattgacacttaattttcagagttcgaccataactaaagagagatgagctccttgaggagcttcccactcccctagtcctcttctgctgaaaactactgggtcctcaatttttcctgaatacaccgctcatgtggccacccctaactgacccagttgaccatggatccaatttcagccactttgtggattggccaaaactctaaaaggaagcttaccatcaaaatttctgtccaaaaaggaatgatgaacaattatctaggccaactgaattcttctttactctggtactgaaaacatataaaagaaaggaggaaatctgagaccacaaggtgggaagggttataagaatttacagaagtcacaatgatgagaaagcagaagatatgaggtggagaaggtaatacatacatagcaaagaagttgatatcgactagatatggcagctgcagtgaggccagagatccactgaattgctgcatatcacaaaagtggagaaataataaacacatgattctgagggaataagttagcctgtatacttgaggtgccttagatcctatgcttttccagttctgcttcccaagttcatgtaccattccagcaaattccggaattcttttcatactattcattctacaataacttgacccctctttttgttgacgatgactttctgttgcttacaataaaaagaccccagtagctgggcacagtggctcatgcctgtaatcccagcactttaggaggctgaggtgggcaggtcgcctgrtgtcgggagtttcagaccagcctatccaacatggtaaaaccctgtctctactaaaaatacaaaaattagctggacatggtggtgtgcgcctgtagtcccagactcaggaggctgaggcaggagaatcagttgaacccaggaggcagaggttgcagtgaagccgagattactgttgattactgttacactccaacctgggtgagagagagactctgtctcaaaaaaaaaaaaaaaaaaaaaaaaaaaaagamcaaaacaaaaaaaagcctaaattatacaacaggatccatgggagaacatcttgatagctttttagcaggaacatcacattccaaatgcttgctagctattttctgagtatcagttatatttaccatgatcctgaggagcagaccctttattgtgtcccagttcagtttgcatcgtcttcatacagcataaggcaacagtgatagaaataatctctagagtaatctccaagtacctttccaaagctgctatgcctcaagtacttcctttaacctttaagcgtctgccttgcatacagtcctcttgggccactcttggcaaaatatttggaaggagatctggaacctgattatttctcaatgaaaaaataatttgcttttgcactgggaagcgacagtaatccaatataagcatgccattgaaaaccttcatgccctactatttcttttaggacttttgtgaaccctttctctttgatacattacctttggcaatcatggtattccaggacgtgccaatgaagttggctgaatctgaatggtcttggaagagtggtttgtggttggaatttctcttgcttgttgatatatgtactttccatgttggactttgtgcttatgtgaattctccacgtctcaaaggcattatgtctagcaagcaatttctcataaattcttatccatacagttattctatgagagcattgcaaatatagtcagattaggctttgatttgtttttcattctaaygctatctaacaaggggatgttctgatttgtgtagccctgtgcctccaagaagttaacggtaccagatacacagctcatttattttcattgtgcccatgtggttttctgaagtcacactttgtgttgttttacatatgggaaaatggaaacctggctaacttgtctttagtaagtgattggtggagaaattagtagaaactacatctccaaattcctgatctaggtaatgctgtttcaacaagctaagttgcatttgaattttgaaatacccactctagattgcaattaccaaatagttgttatgtacccaatcacaggatatgcttttgaaatttttttcattagtacatggaagagagagttttatattgtggtaggtagaaatgcccagacaagacaggactgagataaattaatggccagtccatttattttgataaacacaaataggactaatgcaccttgagctttaggaactagcagggcatttctagttgcagcatagtcacactaaggtgcaaagagtcaatggacaagcaaaaatgtgtaagaagaaaataagattctttgtttgttttctttatttgacatatttaaaagaaggcaaaagtgtatcttctaaaaagtacattttgtggtagacacttttcctctgctaaaccatatgacatcaagtggcatcccttttcttcctttgtggccattctaaccctgatcccagattggacaaggttgaaatatcagcatgaagtgaagttggttctggttaaacttttccaggattgtcccatcttccagtccttgtaaatgagtgtcatgctttgttgccaagtcaatgaggagacaatgttcacatggagacccttgggcacagatgaaactggaattccttctcacccatttcatacagatagtatgaaactcatttcaactgagaagtgaaaattctggttaaggaagaattggtacttgaaagttgttactttaaaaaattatcttgattcatggttttacaagtcagttataaatgttaatagcctccatcactgtcatgttagctgttgtttcagaaaagaaatacatattgtagtagttttaatagaaggagtaggacagtaaatgtaaatgtctgtcctaatggattgttttatacattagagaacaattttttaagtgatcgagtaaacaaagtccccctcctacctccatggtgattgtttctcatagatgaaaacagttttctcatcctgacgacgacaacaacttcttcttcttcttcttcctcctcttcttcttctttttttctctttctttcctctttatttttcttctttctttcctcctcctcctcctcttcttcttctgcttcttcttctgctgcttcttcttcttctccttcttcatcatcattatctcatcatcattatcatttcagtgaccagttagtgagcaccttcatgtccaagcactgtctggggtcttcacagatgttatcctaatcttcacaccagtttaatacaagtgtgttaatatatttgatatgagtgctaggatatagtatttggagatgagggaagctaagctcaaggtcacattctgctggaactggatttgacaccagagctgtctgattccaacacccacactcttccctctgccatatcctgtgggtgtgtatcaagttttctcccttgcctgtggataggttgcctattttttaaattaagctcactctttatttctttccttctccctcctccttccccaatttcccttttctccttctctttctttcatttttttcccaagatgatatttacctgcaatacactattgaaaatttctctatgcttctgccctgatctaatacaatttttatcaagggaaaaataacatttactaactaatacctttccctgtagaacctgatagaaaataaagcataaaatttaaagtttatgacacactgcaattcatccaagggcgtctaaatgttcaaagaggcacaagagagagataatttgcttttaaaagaaaatgaggccaggctcagtggctcatacctgtaatccaagcactttgagaggctgaggtgagaggattgcttgaggccaggagttcaagaccagcctgagcaacatagtgagatcccatctcttaaaaaaaaataaaaaattagccagctgtctatttaaaacaagaaagaaagaaacagaaaatgggaggaattcaacttttgattagattgtattggatttctgaaaggaaaagggggtaccaaaaaacagagaatttgttgattaagtagtgtttaagagcagaaatgtctgatgttcagtttaaagatgcctgcactgctgtgatgtaacctctgcttgcctgatactgaactctaaccatgtgtatcacatcctagacaggggagggaatggaggataattgacaagaacagcttttgatgttaaaactaggagccaaatgcaggcagggaatactgtgggaagagagcaactagagttgaaaggatggaattttccataagcaatacaaagatttttgatacctgactcctacttaaaattaattcgactagaaagactcatctttttctgaaaaactttctaatcatatatcacttattttagttccacatttgaaagcactgttgccacaaaatcacctattcttttactgattttattaattaataaaagacattgtgtaggacagtatatttgtcataattatgggcagatataagcattagctccattgcaaaataggattaaaactgaatgtacagtgttgtcaagtatgaaatatttttcccagaataaatgagtagagaagcatttaaagtctccaaaaactccaaggggcctaagtgggctctcttccaaaaaaataataataacaagttatgatcatattaccctgaaatagattcaattacccaaacaattagtcagctaacaaatatttatcaaggctcactcttctaactgatctgggatacagaaggattgtaagaattagtatcctccctaatggagttttcattctagtatgagagacaaaagtaacacttaaaagctaaaattgaatgagttagttacaaagtctgtggggttgactcgagtagagggtggttgatcagtgtaggtttaatgaaattaaaatgagtaagattctataaatgcaagactggccagagaaagtggggagctctggggccagaacagcagaggaccaaaggcatcctacacagccaattaaggaattttcctactgmagcatggggtccagggagcttcatttgtaatcccttgttctgctttgtttcattcttggactctaatatggtttgactgtgtcctcacttgaatctcaccttgagttataacaatccccacgtgtcaaggttggtgccaggtggagatgattgaatcatgggggcagtttcccccatactgttctcctggtaagtaaataagtctcattagatttgatggttttataaaaggcagttcccctgcacaagctctcttccccaccactgtgtaagacatcccttttctcttccttcatcttccattttgaatgtgaggcctccccagccaatgtggaactgtgagtccattaagtctctttcctttataaattgcccagtctcaggtgtgtctttatcagcagcatgagaatggactaatacagactccatcacagacctttgggctaaggactttacctctaggcacctgccctattacttctattaaatggtgtaaacacagtttgctcacccatgcaattgccttactgtgattcatcttgaagtctagcctgatgacagggatactatgcaccccacaaccaaccctactgagtaattggctccattaaaacaagagagaattgtgagataatctggatagagttagagttcacaccaaacatagagtttccaatttaatggattagtttcatttttgcaacattcagtactgataggatgggtcaattttggcagggcctagttgccatcttaaagcgaggtacggggtgctatttagagcactttgcagcaacaaagaggacaaggtttgaggataattctaatagctcttatacaaagatattgaaccaagtaaatttataatatgtgggtctgcaaagtattcatgtttcttgagaggagtgcttcagattgagagacgggagcaatctgtaaagaaggaacccaatggatggacactggggaatgaatatcaaggacacagttaggtatgaatttaagctagatgttcacttaggtaactgtagcctggagtggaatgacaggttagaagaagtctcctaggctgggtgcagtggttcatacctgcaattccagcactttgggaagccgaggtgggaggatcacttcaggacaggagttcaagaccagcctgggtaacataataagatcctgtctctacataaaatttaaaaagttagttgggcatggtggcatgtgcctatagtaccagctactcaggaggctgaggcaggaggatctcttgagccaaagaggtcaaggctgtagtgaactatgattgtgccattgtactccagcctgggtgacagagcaatactctgtctcaaaaaaaaaaaaaaaaaaaaaaaaaggacttcaaatagcttacctatgaagaagctgcttggtaataccttaaatttcccttctatgcttttacacagaaccctaaccttgcagttgaggacttgagtcatctcacaattcttttgggtaaaaaaaatgtaaactactgtgacccaactttctttacagctgggaaggcctctatttgattgaaaatataaattaagatactaggttttaagttaaaatattaaattacctctagcttttaaaaatcataaagatctttctttaactaacagtagagggatctagtgtttcaagtattgaattggtttaactgagcaatttctgaatgtcaaagcaacagattctctaataacatcttttgtttttctaaagtttattcccatattatgttatattatcagagagccatgtaaggggactatcttactttatatccccatagaatttccttcccagagttacaatttaacattttgtcctcagcttttttatagaggtcaatataagaaatagcacaggaagaatctcttctcccctctgccctttactctgggcagaattaatcctttacttgtctatgtatatactgtgatttatatatactgctatggtagcacttaggtaataatattattgtaaggaattttgctgtctgagataaatcttccctatattctcccctttgttttactccaaaggactataatcctgcagagtttttcactaatgaatttaggcattatttttctctaaaagaaagatcacactgaaaattatataaaataggctgttttcctgggatacccttgtggcttgttagaacacccggagtcagctggactggactgccactcttcttcacttactttataggcagatgctattccttttagagactgtctctgaaagtgaggaccctgggttatgtctgatcgttgggcggggagggggctttaaggttctaatttttgtatgtgtcctatttccatgtcttgtttcccagataaactatttccttctatgtctctgctttcctgaagacaaaggtacctttttctcagcagtggagttggagaggaaacagattcaggaagagtccaatattactaccattattgcaattgcgtagtagtacatgccaaattcaccctgtcttttcattttacttacctttctcttgtcccacatgcttttattcttggcatgcttacctacaaaattatcctttttttctatttccgtattccctatgccctgtagtcttctttcaaagcccctttgaaatgctatcatgaaagayggatttcttttctcagtgctgtgagcacctccatctcctcttctcttctttcacggtgcccatttcttcttcatctcatcaagtatgcagtcctttcttcgtctgcactgttatgtacctccttccacctttgtttcttccaaacttgtatttcttttgtctttccatttaacaggcctcatttcttttatcttaggaatctattcataaaatttatacagtctttaaggtgcaaacaccttgaaggtagagaccatattatttctatgttctttatattggcactccaattaaacaaaagtctatgtccagttgaagtctggaagcctgataagcacactgaagtaaaagtcgcaatacacatgaatgactgaaagtaggttttgttaccagtggaaaagacatttgtgagaacaaaatgacacataaagaggaagcaagtgattactgacttactggaaatcccaggccgggcacggaggytcattcctgtaatcccaacactttgggaggctgagatgaggggcttacctgagctcaggagtctaagaccagcctgagtaacaagtgagaccctcttctctaccaaaaaataatttaaaaaaaattagccaggtatggtagcccatgcccatgcctgtggcctcagctactcaggaggctgaagcaagaaaattgcttgagctggagaggtcttccagcacctgaaagacagagaaagaccctgtcttcaaagaaaagaaaagaaaagaaaacccatacatttagctcaattgactaaaagcctaaatgaaaaatatatatctttcagcttaaagggttggttggattgatttgttgagtaaggtattactatttggacaattgtaaaaaggacctgtgaaagccatattttggcttggacaagctcacccaccccatgccccatctctactaagggggggtgggattcactgtcaaaagagttcttctctttaaattctatacaataggtacagtaattatatctaattgcatttgaaacacaatagttattaaggcaaacgtttctagactagtttcattattaaataaaaattgaaactgagagtttttcccatattggtaaatattgwtttaattttttaattgaatgggaataatatgggcatttttttatcatttgcccaaaatattttaagaaaatactatatagtgtaaccttttttttttttttttactatgaaggcattaattttgttttatttttagtacttgcttccagttcacttttcaaagtgtcctttaggcttgttagtttcaaaggaaataatatatttccttttgacttaaaatgcctatgctatcattagatattaatagtagaagtaacagcaggattgcctggcacaaatttgtcctgtccttcttctggctaggcaatagggtgcaaatgttccttgctgtgcttttgatggtgaaatagaaataacgcttcacattttataacacattatatttcataaagctctttcacattcatcacttcatttaatcatcaaaaacaattctgcaaactgatattatttttcacatttaagtgtgagaatattgatgctcaaggaagcaatgatttggctgaggacccaaagtgagtgtcagtgccaagacttaaatctatttcttctcactcactccagagtccttcccacatcatcacactgtctccttctactgtgctttgctctaacctgctgaactaactagcaagtgtctttagcatactacattagatagctaagacttactgaatgcctactgtatgccaaatcctgtcttaagaacttacatgtgttacctaattcaatccttgcaacccatgtatgataggtaatattattatctccatctcgcaaataaggaaacatagaatttaaataacttgctcaggaaggcatagccaataaatggaataagtaagtctcaaatctggacagtctatcttgagaaatgcatgcttaatcaccatcctctattgcctcttaaataatcaaagcccgtaaagattttataaatgacttttctcatgaataatagggcctggggtgagtttctcaatatcacttayggcaataagaatttcagcaatcataatcttggtgcattttccaaaaaggatggctccccattgggtaacacaaggtgaaatgtgtattctgttagaaatttttgattccagcctagggaggtatcaagaataatgctgttgccataaagatataagtcttgagacaaacactggagaggttcagtcattcaatcaactatacatatattactgaacattttttatgttcaaatgctgtgctaagtatctgaataatattcacatgaagctgaaaatctatcaaaaatacatttgaatacagatacttggtaaaatctctaaaatgcacaaagcttcatggacacatgaaatttctttactatggagaaatcaaggaaggtttaataaaagtagtaacattagagctaatctttgggtaaagaagaggaaaagacaaattgtagtgcatgctgtaactgtatataggttctttggagatagctcattgaatgcaaactttcagaactcacttcatgagtcaataggaactttacacaatggtgagaataaagtgcatcctttcaaagcacactgtccatggcgtgagagtaaccaccacactgacatttgttgaagaaaggttctcctgggttctccccactctaccctccttggatgccaattaggcaccttaggaaggacaagtgtcttccctgtcccaaagaattgatttttatagatatttatatctacttttgtgaacatgcaatgttcattttgattattattaaatcaatgtaaattctgaatgaatttctctgacttttactttgcttattaagttgaagactcaagggcaatgcagatgagaatttcagattcttcctttgagaggatttttggtcagtggctctttaagaagacccaaagcaggttgggtatacttcgtaaaatcagatacttggtatatagttcttttttttttcttttctttttttggtaacatcaccacgaggatttctttgctgaaatgcactgaccttctgtaaaaattaacactggaagtattttccaatggaaattgactaataaagaaatcaataatgaaggaatatttttagactggcaagaatcatgatgacactgttaagaagaaaacattgtacatatttaatatgtttaaattccagatcctcaatattatgattaagaatttaatgatttttgtttataattccttctcattgtgtgcccacatcatacttagcttaaattatgtatctaaatatgtcttctctataaagtttcttgtggtcagaatcaagtggtccactagtttcatttagcagtagatgtatatattttgacacataccaaagaagtgcagctcagtacccaaaagatgtactaactgaaaactttagttcatgtaatatgcccggcattcaccctcgcggaatttagacaggagggattgtggcctgtatgtttgacttctggaacttaccttagtaaaattcaaaaaacaggttcattagtaatttcttcaaagaaatctgcttcaatttattcagatgttttgtagtctctactttgtattaaatataaagcactgagttaaagaggtaaaaatatcaaaatgaacaggatagtctctctcctctgggatcttataatcatgtaaagaaacagatatgtaaaaactgtaaaaaagatatgtacaatataattataatataggaaaattaaaggccatacattttgtaaataaacagctatgggaacaaaaaaatgtgcatttttttttctaattggcaaagtctaaatgggattgtggaggagcagtttgtatttaagcctgcaattgaactacatgtattatttttaaaactggagatttgaagggaacactggtggcaaatagaattgtatgaacaaaggaacagagatttggaaaggcagatggatgtcagcatggctagaggacaggtacacagctgatggggcagaaggtagctatgaaaggtttgcagaagtcagattgtcagtttcttttaaagcctgctaaatgtgtacactttattgtgtaaacagtggcaaacagtaaaggttttgaactgtaatgatgtagtggtctgggctaaactattcagagcaagcattttaggttacagtaactgaactgtgggtttttgtttacatgtatccagagttgttccctacctttgcaaggtcagtgtctcagtgatgtgccttaaataccttgtccttgaaatagaacctcaacatcttcaccttgttctttttttttaaaagaccgtgtcttactctatctacaggcatgcaccaccatgcctggctaatattttatatatttttaaagatgggacctcactctcttgcccaggctgatcccaaactcctggcctcaagcaatcctcccacctcagccccccaaagtactgggattacaggcctgagccaccatgcacagacttatccctctcttaaaaaaatttgttttcaacaaattcatatgagtaagattaagaagaaatggtacaaccagacataagctgaaaagcaaaagtctcctttcctactttgtttattttgcttcccctttcagaggaaactacatttgatcattaaaccaatacatcatttatattcattttttcaaaatatattaggttggtgcaacagtgattgaagttttgtcattgaaagtaatggcaaaaaccacacttttgcacctacctaatataaaacttcatttttgttttgtctttcatattgatgaaccatcatytgtttatttttttggatattggattgccttcattgttttcactattataaatacccctattacacatacaaaatcaaaataccatttttgccttggctttttaagaaaataaacgttgattttaaaaacaatttcagatatacagaaaaattgtgaagatactacagtgaattctcatttccctctaccatgttccccctattatgaacatcttatattagtgtggtagatttgttacaataagtgagtaaatatgaatactaattattttttattgatatctgatattatttggctctgtgtccccactaacatctcaccttgaattgtaataatccccacatatcatgggagggacccagtgggagataatttaaccatgggggtgggtttttcccctgctattctagtgatagtgaataagtctcatgagatctgatggttttataaaggggagttcccctgcacatgctctcttgcctgccaccgtgtaagacatgactttgttccccctttgccttctgccatgattgtgaggcctccagagccatgtggaactgtgagtctattagacctctttcctttataaattacccagtcttaggtaagtctttattggcagcatgagaaaggactaatacaatatcaatagatgttgatatcaattatttttatcataatttattcagattttcttagttttcacctttgtcttccaggagcccatcctggataccacactacatttattcattatggctccttaggttccacttagctgcaatgttttctcagacttcctttgttttggacagccttgtcaactttgagtaatactagcagggatactgatgttttcctaagtaccagactggcgttctaggtttagtaaggaagttcacagaggtaaagtgctatgcatgatatcaagtatacatattatcaacatgactttacaccattgatgttgaccttgatcactgggctgaggtagtgttgtcagattactccgcctgaacatcattgacttttcccctttccattctgtactgtttgggaggagctcattatacacagttcacacttaaggagtcaggaattactgtccacccactggagggtgaaatatctacataaattaattgaatttttttttcttgagatgaagtcttactctgtgggccatgctggagtgcagtagcacgatctcagctcactacaacctctgcctcccaggttcaagtgattctcctgcctcagtctcttgagtagctgggattacaagcacatgccaccacgcccagcaaatttttgtatttttagtagagacagggtgtcaccatattggcaaggctggtctctaactcctgacctcaagtgatcctcccacctcagcctcccaaagtgctgggattacaggcgtgagccaccatgcctggatggaattcttttgtatggcagatctatttcttctatcccatttatttatttattaattcatttatttacatcaatataggcttatggatattcattttatactttgggttaccatccaatatgacttcactttgttgcttaaattgttccagctttggccactgacttctgtgcccctctgacgtttcccatcagtgtgggatttttttttttaagcacttccttactttctggaacgacatgattctccaggcttatcttgcatattttctgcttcaacattaggcaaccagttcttcaaggagctatgactcttttaattggggaacagaacaaaagccaagacctgagtgctaagtgtgattgttactattggggtgcccttgcttctagagcttctcagctgataaagtaaagaaatttatgtgtgtatactaacttgtgcctgcgcacctatctataaatatttctatatgtaaacttctgtgtctacattaagctaaacatgagtacattttggtgtttccaagtctaatatattaccacctggttagtctagcctattccccttgtttttttctgtaaaatcctacaccaaagtgagaaacatggcttctaccttcctctatccattcacataattattaaattctattgtatgcttgtagctgaacaaaatttttaacccatattgctgtaggaaagacactttatcaactagagagtttgagtttatgtgcagttcctcttccttttagacttacagactccactcatttccaaaattactgttaaccacttttaccttcagtgaggttgtagtgtacatttgtgatayagttatattcttttggaacagcctgcattccatcctgtgataaatatgtattgcaaactctaaagaaacctttttaaaatgactaaaaagaagattaaagatgcagtgatgcgggaaatcagtaaggatataaaatcagtaatttgacctgaacagcactatcaatcaatttgttctaattgacatgtatagactattccatccaacaacagcagtatacacattctgctcaacctcacctggaacattcatcaagtagaccatattctgggccataacatttatcttaacaaattcaaaagcgtggcaatcactttgaggaacttttccagagggtataaggaaaggacaaacaaatgaaatatagaaatgatagaaaaagtgaaataaagagaagacattgtaatgttaatgtccataaaatagaaatacaagaagcattaaaaaataaataaatcaaggatagaaaatatttgaagaatattgtattcaaatatatcttataatttttgaaattataaaagcattaagaacccaaatttgagggtttcataaatggttaacaaaataaagaaaataatcctttacctagctacattattgcaaattttaggacataaaaggcaaagagaacaaaacaaaacattcaaggagggaaaaagaaacaagtattcaattgttatatttctcaccagttatggtggatacatgaagataatacgttactaaagaaaaagtgctttaaacctgggaatttatattttattaaaatataaaatattatttaaatgtgaaaatgaaacaaatttatttttagtttgaccacttaagatgtgctttgaaaataccattgaagatgggatatccataaaatggaatattattcagcaataaaaactcatgagttatcaagccacaagaaacatggaagaaccttaaatatacattcctaagtggcagaagccagtctgaaaaggctgtatgattgcagccccacgaccttctgggaaagggaagaccatagagacaataaaaaagatcagtggttgtcaaggattcagggactggttgaggatggagagggcagtggatggggagggaaatgggtagaacacagggcatattgagggcagtgaaactattttgtatgagactgttatggtggatacattgcatcatgcatttgtgaaaactcataaaagtgcacaacaccgagagtgaaatctaatgtaaactatgacctttaattagtaataatgtatcagtgttggttcagcacttgtcacaagtgcaccacactaatgcaagatgtgaataatagggaaaaactcgggagggtgggggctgggggaaggtgtagaaggaatacatgagaactctgtgcttttggttcaacttttctataaatctaatactgtttaaaaaattaaagtctgttgattaaaaaaaattacaccccagaaagaaaatatatccaggagaacccaggaaaatatgggaagtatggatgagaaaactatcaaagctatcagtaaggtatattacttataaataaacaagaaacaaaagagaaaaagcattcacaaaacaatccagactaacaattctcaaagacagaaatgtggtgtggtgggaaaaatgggatggagagtgtgaacaaagtcatgatgagacctcacagaggcaaaaatgtactaggatacttgtcttgggggcaatataaaatcatgtatataatttaagggtaattaatacaagtgttcatttaatacagtgggaataactaaggaaaaatagaatttgagaatataattctcaaaccagaagaagaaaatttggtatgaccaatgaaaggaagaaaagaaaagaaggaaaaaaagaaaggaagaaaacatatagagaaggaatagaaagggaaagaggaagaaataaaggaaaaagggaagggaggaagaaagaagggagggaggttggaagagaggaaggaaggagggagggagagagggaaagccaaaacaggcgaggaatgatgagaaggatgggtagctgttctgtggattgtgtgagttaaggggaaggaagtggtgggacttaacatcagctccatatgctacagagtcaagtatcctcacatattcttacattttccctgaagttatatattgagagccagtggaagacatcgtagaaattccctggtctattttgtgaatgtgtcttgtagtacatagataattacatgtgagccattcctataaaaaggtttagattggtcaaggatgaaagaaaaagagacttgcaggtggaaaacaaaaagggcaataaattaaatctttcaaaataataattgctgaaaaatagtcatcttaagaacctcatataactactagtttaaaatattgccatccagttattgaaaaaagcaatttttcacatcaagaatttttatttatcttaaaatatttcagaggcaattggtgttatgctttagacacttgactgacagtaaaagtttactataataattcaaatgcctcttcaaagtggatgaacagaaacaaaacgttcagagaggtgagtgttaaattattattatttagtgggaaaatgacctgaactattttctttggttgctgttacataatccataatctgatatcagttccattttgttgtttgtatttgtgcttgaactttcaatacaatagaggtcactaatggaagcctaaaaaagaatttttatttgacttttggttcattagaagtttctttgttctagttattttccttagcagagtgaatttctctcactttctcactatttgtccaatttactacctaagcctggatgtttgtcttttcatactctggaaacatggacaaagacaaaacatagggagtttcgaggcattattcaataactacctagagaataatggctctattttatatgatctaacttggtcacttgaatgggtcatatttctccaatattcacagaaccacctaagttgtttttggttgtgtggacatagatcagattgcctttgaatcatgatttgtagatgtaaacactatttattagttgtaaaaactttatattatctttaacagcctggccaaaaggtcattattgtttaggccttctgccttccagaaagagtatgactaaaacagatgtattgggcagaatttccagaaataccccaccacccccaatttcacagggctaatatccagaatctgtgaatgtgatgtcttttcattcccatgattgtcttatgtgatatgacgtagttgaccctgaaagggtagggtattcctggcagacctaatctaatcacagaagctgttcaaagcagagaaatttctcgtgctagtgacagaagacgaaagcatcagggaaagtcagaggaattcaaagtgtataaaggacttgagctgttgctggtttgaatacagaggagccacatgagaaggaaggtgggtagccatgggttgctgagagagagattcacagctgagcatcagcaaaggaacctggagctcagacctagagccacaaagaactggattctgccaacaacctgaatgatcttgaaagtggtttcttcccccacattctccagattagagcccagtaagccatcaccttgactttgaccttgtgataacttgaccaaacctagctaagctggccaggacttctgacccacagaactgtgaaataatacatgggtgttgttttaagccattgagctctggtaatcagtaatatagaggcagacaataaatatagcatctaaaaccagtagtgtttattttgagatgtcaaagaggatcccattctggtgtttgatatttcagagtgccaggccatttttcctcacatcccactgacattcctcttgttttgatttaaatgaatagtctcccttagatgtcccagacaggattataagtctctttccttaaaagtttcagttgttaagatatgtagcataaaattgtatactataatggatcttgtaaatctaaccatttgctaaggtaacacaggttgtaggaagcaaatctggtactagaagccaagatgaaggattttcaacctagtgacctttctactcaaaagccatactggctctgaccttcatattttaattgatcaggcaaataatctcaaatcctccaactttgtttgattatttggctaattctgctcagaatcctctctaaatatctactggaggcagggacattaactgaatttgaaaagcaatattatggtaagactctctctaataataccataaaataccatagcaaggttgtttttaacagataattaaatgaagtccaaaggaaataactagcttgcccaaggttactctttgcaattgagaaaactgaggcttgaataggtgtaattattcattcaaatgtcctcggccagttcatggcagagatagaaagtcgatccacatctcttgatttccaattctttttttacactgagctatgtcaatatgtcaattctatagggtttgccctcagattagtttgagaaataaagtatattcacagcctctgtgttttcagtgtactaccagctgggatatctatgacttagttccaagctgtgatattctctgggactacaaatttttaagagccattttaaaattggctagaaggcaaatctagggtgcccataatgactgtacccagccctgctatgagtgactgcactgtgatttattccctactcagtgcccatcccccactccaaagccctacaggatttaggaaaaactgctggaagaaatgctacatcatgaaagcttaaaaaggctcagggaacaccacacttgaatcagtataggtgggactggtatatttcttttgctatttcattatccattttgcagttcttataaaaaatgagtctgttgatgtagtcttctgaagcattaagatatatgctatttctgcagtgaacaggctgcttagtgaagaagagtgtcggctcacttttgttctttcatatatttattagagtacgctttcccagagtgtcgattgcatgactttattgaagctagtttgaactcagactttcccccactgaatctgagatccactgaggcccagacaccaaggagctgttacacatgtataactattccattcacacctcttcaggagtttcaaacaagtttaattataagagaaacaaaagaaagcacttcttctttgccactgctaggaaaaaaaattgctttgcttggaaatcaattcattgtaagctttaatctgcctagttcggtttctcagaatgaatatttcaaatattaaatattttcttgagtagaatgtatagtacatattttatactaatatccatgtgtgtgttagacaattaagaagactggagtgttttccaaaaacttgaaaagttttcggtgactcgtaatacagaagtgacatttttatttgagaacaatttaccagattatgtcaagttcattattggtatgatactaattatccttaggataaattggaaaggggaaccctctgctagttttctgaagagctgcgtaagcctgatgaaatgtcttttctctttctgtgactcaaagctccagaaaaatctgcaaagttgaatatcacttgtgcctgctaatcttgtgtcatagttattttctatcactgtcataatgtcagagaagcactgggaaaatctgcacatcactcatctctccttcttcacccttatccaggtatatccacatatatccaaacatccagaaggtcacaggtgggatatttttgaagatgtactcacttcagcacaggtgaacctgttgatgacttccaggtctaaatatggtgaccttagtcacactggttatttttagggagcttcctctgactcttttataaactcaagatgataaatgcaatctacctgtaagattcttgagaaatttgtgttgtataatatgaccgtatatgatcccagtagttgtgtggaacttgataggaaccacagtaagtatcacctctccttgcttccatcattcccctactccaacagtttcatcttcctcttctgtttctagtgaataaaacatagtctgctgattttaaggtatattccattcccagttgtatacacaatggttaactttacattcgtgcaatcagtcagtcaacatttgagtgtgtactctatgtcagatgctgttttaggtgctaggggcccagcagtgaacaaaacaggccattgctgtgctggaagtaaaattctagttgggggagacataaaataaggaaataaataagtatataatataaggtaatatatacaaatgaaaaaaataaagcaggaaagagggtagggttttggggggaagaggatgttaaaaagttctaatggtctaggtatggctcattgacatagtgacctttgagcaaaatcgtgaaggtgaaggagctttactctttgaatcaggatgtcaggtcttagtttagactcttcagactagatcttagccattgtttatagatttgcttaaatgtctaattctttttcagctgattatgttggagtttattgttcctaatgaccaatatgctctaccaatgtcagaggcctgattgacttttgagggacaatgactgctccagtttatgcactttctctccccccagccctcccatccctcccatcctcctctgcctaccctccccaccccactcactttttggggttcctttgtcagctgtgtattatggcaaggatcgacattttcttgacattcattgtagagaaggtgatgtaatctctccttggagggtggtcacctgctgcttgcaggctgagctaaaagcagattctctcaatgacaggtatgactgcatttcctgggcaccttcagcaaacaaggctcttgcaacaatagcttgcgtcttattcttaattacttcataccccaaattaggtgggctaaatatctttttgttgtcacagaatggaaagcacatcataattagtgtaaaacaaatatcctcatagggtccaacatgcagtatcctaaaagaaaacgaagtaaacaatttatgtattttgtaatatacatggaatatgccattaggttgttttgcaaacccatgtaggtgatcctggtagattagatttacaatatatctttcctttcacttcattctctccatcctctatccattaatttttcttatatctagaaatagggcactaaagaaaactacagtatacagttcctgctttctctgaaatcaactattaacttcaggcaagtggaacacatacttggtacattacttttttttaaatccctgtattgcataatagaagagaatggtaatttttatcatgccattaatgtgattcctttctttattgcttaaagtgtcaatcagtcaaattgaaatgggttattactctgttatcttcttcattttaattatttggctctcccagcattacccttcattacctgttctccagaggatttgttttatctgaaaataatttactgcttaacatcgatgcatttttctgatatcgttaggtgggcctggtgttacatttagagagttaccgtcatcagagtaagaggaaatatatacagtgttttatcttgcagaacttaatgtaccaaatctgatgtcctataatgtttcagagggatgatacaaatcatttgcaactagaagctgaatattcagccttgtcacaagaattctcccttattcaattagattttttaggtgtttgctttaaaaagtaatatcagattagtaatggggaagcaatctttgaaatcattggtgggccaaaccatgataataagatacaaaagagaaatgaatggtgggaaatggcagacacattacacataaacattgttttgttatggcaaatctctacggcttctcaccacgatgtcagtacggaagtttgaaagaaaaatgtatgcgtctcccgtagagcccatgaacttgttttcttttgcatattatagaatctgcaggtatttttcaaatgaggaccacaaacattcaagtattaggttttcttacaatgacagccaatttagcaagcccaaggttttagagcatccttcaagaggcwggttccatttgcacgttcatgttcaattcgcaaagcaacagcagcagcctttacgtatcccacgattaacacttcaacctccagcccattttgtaaggttaggcattcatcaaaatgtcagaatgattacagtacagatctaaaatcccttttgtcagacactggactttaatccgctcttttctgtagtcacgtcctgtcacttttgcagctgacaattattgtttttggtcaaaaaattgtaccttgcaatcaaaatggcttgttatccaaattgatctctgatgctacaaaatgttgtttgtggacaattctcctgagcaccactctccctctcctccagagtttacagttgaaatggaagcaatagaaagtcaggagaacagggtggggctgaggcatgcctggtcttttcactgctaggcttggatgcctaggaaatttacctggaggcttctgagtaactgaacctctaaaagatattaaacgagactttttcactattttattcatagtttgtgcttacttttaagtgagcttttgttttggaattaaaccctgacagtcagtggcagctagaatcgccacctgtcaaaagtaaggtttccagtaaacaaaatatttacatatatcaagtgtgagagagactggggaaaaatttaatgggcaaacagaaattcatagaaggctacaaagtctttcttgaccagtctcacttgtaggtcttaagcctaagatgccatattacaggtggatcagcttcgggaggaaagcaagagctttctattggaagcaagcaaacccctctttgtgagtttctttgcatttgaggttctataaattttggagctaaaacagttagtcccttatttttgtttcactgaagctgctgaatgctaataggttattgatgatggttttatttgccagccatgaaaaatgcttggacaacaggacatgcatgacagttaatctttgtagagagaagatgagcatcagtggctgaattaggtgcggagggttgcagatgatatttaggaacacagtgacatcaagggagagggtagcccatggaactgctggccataaatagttttaggcatactaaaaatatcaggagaggataggagagactatgtggaattgctttacaagaatggcagcttcttaagaattataatgagatcagaaggtacaatgcttttcagtacttagaggtttttttctagatggaaataagcaaaagtagagaattaccagggtttacattttgtctccatcatttatagctaattgaacatgggagaaaacgtagcttccttctaaggctcagcttcctcaactggaaaattggactaaaaaagaaccatacttcagagttgttaacaggattaaatgagataatatatgtcaagtgcctagctcaatgtttggcacctcagcacatgctccagaagtggtatcaattattattacataacagagataatatttggtgggctatgtgtatttgtgagtgagagggagaaagataactgttttttttacgcatttttgtgaatgtataactttctcccaactcagctgaagcatccaccatggagagaagtgcttcaggactgttaccagagaaattgaatgagaaagagatgaaaccattttttaacatccctaatgggaattttcagtgaatggctagacagtaggcataaaagccaaactgtcatcagggaagagtctttatacaatcaattatcaagatgcctgatggataaactagaccacaagtcctgcaggaggacttgctgggatggataaagtaaggaggcagtaggtcatcccttctgttctgaggaatgtgagaggaggacaggaaggtaggaagggcaggagagtcttcctttgcagactgtatccaagactggaaagaaattttaaattagtaaaatgagataccagcagcaggaagaggaaccactttgctgaccaaccctatacccactgggtaaagggagacagagcatcaaagtgatcccagtgatgtcatgtagataggcacagagaaaatgttggtgcttagctttcttgagcatgcctgctaataactggcatggatgggactgaaaagttcctgggttgcctaaataaaatacaaaggtgataactgctaagctgtgccagtatgaaatgaaggcaggccaaggcctccacagagaaccaccagccctgattaaactataagagactggccaccagattccagcatcagatcccaggtagggcgccatacaggagagaacctacaccagggactggcatgatctcagactcccatagatttggaaaccctgtctgtccactaccctatcatctcaaaactcactacattctgtacactcagtgcaatctttgaggggaacagagaaaagagagaaaatgggaaatgatgggattaagctaaactgacatgatagactaatcctaatcctattccctccctattcacctctgtcatcaccagtgccacacagaaggtgggagtcatgagaaagacacaatgcattgtacataaaaggaaaaaagctgtgtcttcaccaactcgaaataggaaaaattgtgaccctgtgatgacaactattacagctgtcataataaaatcaagatgatggctgtatttctcaggcctcacatcaccttttcttttacaaattatttgaaatttaaagtagttttttctaattctgtgaagaaagtcaatggtagcttgatggggatagcattgaatctataaattactttgggcagtatggccattttcatgatattgactcttcctatctatgagcatgggatgtttttccatttgtttgtgtcctcttttatttccttgagcagtggtttgtagttctccttgaagaggttcttcacgtcccttgtaagttgtattcctaggtattttattctctttgaagcaattatgaatgggagctcactcatgatttggctctgtttgtctcttattggtatataggaatgcttgtgatttttgcacattgattttgtatcctgagactttgctgaagctgcttatcagcttaaggagattttggtctgagatgaaaaattcatcctgctaaaaatgcttgatctggtaagccaagtgctagagagactagaggagccaaggaacacgtaggtagggtgagataacagaagaatacccaagctgaattgaaaggaggaggtgcaaagaagcttgtgcattggattaggaaaaaatatagactttgaactcacaaggacttgatttttttccaatttgtcgtctcactctctgcataacctctattatgagttgaattttgagccccccaaccccccccaaaaaaagatgttgaagtcttaaatcccaacacctgtgaatgtgaccttaattggaaataaggtctttgcagatgatcatcttaagatgaggtgattaggatatatcctaataccacatgaatgtatctgtgtataaaggggaaatctgaacacagagacagacaagtccaaagaggatgaaggcagtgatcaaggtgatccagctacaagccaaggaacaccaaagattgccagcaaatcaacagaagccaggagagaggcctgaacagattctccctcacagcatgcaaaaggaacgaaccctgccaacaccttgatttcagacttctgacctctagagctgcaggatgataaatttctgttgtttaggccacccagtctgtagtgcttgtaatgtcagccccagcaaacaaatacagcctctcaactatgtctcatcggtaaattaattatttctccccaactcataccataaaatattttagacagcttgcacaagcccccaaacaaaaaaactgtgatgaaatggctaaatagtgtagtagccatggygtatacgaatataaacagaaacatcgtaacaggaaaaaataagaaagtccattagatgcagttgagcttccagcttgtctcttagtttcctggaaaccaaagtgaaaggaggtacctgtttggtcagaaaagttttagtattacaaaggaaatagcattgtatttctttaggggaagcaaaaactttttcttagccctaaattctacaggcagtgctgaattgctcagtaaacaatgcacttaatgatatttccttggcaaatttggtgaattatccatacactggtgtgtatgtataacatggtagtgcaacccccaacctgaaggtgacacttgtgcgcacgtaaatctctatttcttagagatgtcaaatcaaatcttataaacataagaaagctacataagcatcacaaaaaattacaaacagctatgcctcattttcataagtgatgtcctgactctatctgatctagttttcatgtaagtcctttgccactttacatctatcctcaaaagcctaacggaatctggctggataccccaggtgcttcctcaacgtagaagttttctcttgtttktttttttttttattctgagttattttgaatatatcagtcaattttaatctaaacttgcattatgttttcaaatacaatataagaatttaattaaaaacaatgcttcactgacagcagctctacaattctgtatttgacattgtagtacaacatgcaaaggcatgtattgaggtcagtctgaaatgaaacacttagcctctatattttttggaaaaacaaatccaaaatatgaaacattcagataggtaggcataacattcagatgtccagtgatggaggtcttgctttgaggggcaggctgtttcaggtataaataaatctctcaaagtctatttaggaaaaagatatatatatattcctgcaacttcttttgtttatttttattttttgtagagatggggtcttgctatgttgcccaggctgttctcgaattcctcacctcaagcaaccctcctgcctcagtctgccaaagtgctgggattacaggtctgtgccactgtgactggcctctgtaacttcttaattctgtctgcaggagccacatggaataatttatttagtgctttaaatatatatatatgtcactaagccattttaaggaagataatcagaaaataattatcaagctgttttgaccaatataattcagattctacttcaaaaaattacaagagattgcctgaattattttttatattaaaaacatagcaggcatatgttacacaatgagttttgttctgtctttcatttgttaatactttcttaggatgataatagaaaaaaaatttgagaatttatctttctctgtaccatcaaatctacagttttccgttgtttattctcagtcatttccattcccaatttaaatgttggatataataaccagccatattaaaggcccgattctatgaatagaaaacatgaaaaaaaatttaagcgaggatttgggagatggtggtaggtaactgaacttggtaataacaataaaatgatcccaatcagaggctgttgtgtgagcacagcctgtacaattaatagtgacacttcagcagcaaagccactccaagaatcataccatcgtttgccattttatatttctctccaagattttccagagaaatgccatcaaaagcacaaatactatttctaggattccaaactctaagaaacatattaattcagaagatgttaaagcatcaaaacagagaggaaaatgttggaatggttactatttatgactagcttctgctctctgcactgaagagcgtagctatttccttcattttacagttgacattcagaaaaagtacattaaaagtacccagaaaagccttatctctgcatatttttgcaatttggaaggacaaatagaaacaacattagaacttgatacatttagtcgtactctgtattgtagacttggagtggaaaaactgtattgtagactcggagtggaaaaaacacaaactgttttccctccgctctcacaccacaacaatcaacacagatgacttctgtgaccaaatgtgtagcagcttctccacaccaacaagcaataggcaatcaatcagttctgcagcagacaccagctgggtgtcatccagtttaattccaacacagcctggatggagatatcatcagatcccacagcttaaaggctcagtcccacaagaccaccgttcgcttcacatggcagtcacaggccctgggttgttttacatgcgcttctgaccaattgtctataaatcagggttcccatgaccccttccttgtgttcaatgaatttgctagagtagctaagagaactcagaaaaagacgtgactcagtttgttgtaaaggatattacagagtacagatgaaaagatacgtaaggaaagacatggggcaaaggatgtggagcttccctcctgggcacaccaccctccaggaacctccacacatttggctctccagcagttgtctgaacctagtcttttttgtgtttacagaggcttcattacgaaagcatgactgacaaaaccattggctattggtgagcaacttaactttcagcctgtctcccatccctggaggttgggggtgggactgaaaatcccaaccttctaattctgccttggtcatcttttggtgaccagtctccatcctaaagctacctaggggttgccagtcctcagtcaaatcattagaatatgaaaatatatcattttggaaaccctaagaattttaggattgtgtgccaggaaatgatgtcaaagaccagatacatgttttataatatcacagacacatgcataggttgtccaattttttctaagtgaagttaaaaagtatttcaaccccaattgtcctattcttcccttacatcattccttcctatacttctgtctaatgtaattaagaagaacatcgaggggaaacaacttttacttgatcagagaattaactgaactattcacttcccaagtgttcaactgaaaggtagattattttatctcatcattttaggattccttttcttaactgatttgttgtttatattgagtaaagtacaccaatattaagtagtacatcttgaaaatgttttacatatttaaaggtaatagctattgtattttctattaccctatattaattttgtctgtttatgagccaaaaatagattgttgcagaaaatatgtactctttgtatcttatttctttctctgagtaaaatgctttttattttcatctattttctttcacacagcagtactttatcttcttttatattccactaaatgtatgaaatgtatgttgttttttcactgtcatgttgatggagatatgggatgattccagccaagggctgttacaaataaagttgatataagcattcttgtatatgtcttttggtgggcatgcatactgatagaagtggaattgctataggtagatgtatatttagctttaattgatactgccagactcttgcaaaatagttgaactggtttatattctcactgacaatgtatgagagttccaggtgctccacatttaatattgtcagtatttttaattttagccattctagtggatgtaagttggtatcatattgtggtttttaatttgcatattcttgatgactaatgatgtttgggacattttcataggcctcaactgtttgaatatctttttagtgaagatgttctttcgattttttgccctttgaaaaattggtttgttcatctttcttattgatttggaggagttctgtttttttttgagacggagtctcactctataacccaggctggagtgcagtggtgcaatcttggctcactgcaagctccgtctcccaggttcacaccattctcctgcctcagcctcccgagtagctgggactacaggtgcctgccaccaggcccggctaattttttgtatttttagtacagacgggttttcaccatgttagccaggatggtctcaatctcctgacatcatgatctgctcgccttggcctcccaaacagcagggattacaggcatgagccagcgtgcctggcatggaggaattctttttatattctgcttacaggtactttgtaatgtatgtgtacaggtactgtgtaatatgtttttccactctatggcttgcctattcactttattaataatgtcttttgatgtacaaaatttctttatttggatagagcccaatttataatttccttttttgtgtttagttctttgtgtttgtttgttgaaactttgcttacctgccaaatcacaaagatatttttctactcttctagatggttggtgttttagttctgtgtttagatctgtatccacctggtatttacttttaattatgatatgcaacagggaccaaggtttttatttccacacagttgctatagtaccagataaccagtgctatagtaccatttattgaaaagactatccttttctcccattgatttgcagtggtgactatatcataaaccatatacctgtgggtctccaggtctatttctgtagtttattatgctcgtttggtctattctgttatctttactcattatcaaactcctccagcttcttgtacatgtttaagattgtctttgttattgtacattatttccatttttaaataaatttggaatcagattgacaacctcctccccatgcctaccccccaaaataaatcttctggggttttgaatgctattgcattaaaaccgtggatgagtttaagtttgttggaaattgacatcttaacaatatatcaagttctgcagcctattaacatggaataacatctgcatttagttagttcatttctttcactaatgtgttctattttggaatagatgtattatgcatgtttcattagatttattcctaagtatttgtttttgatgctatgctaaatggtatttttatctcactataattgttattattatatgaaattcatggatatgaaatacaattaatttttgtatgttggcctagccagcaaccttactaatttcccttattagtcattgtttctttagtattgtttatgaccatgttatgtgtaaataatgatagttttattttttcttgccaatttttgtacattttatttcctttccttgctttattgcaatgcttcattccagtataatgtggaatgggtgataatagacatccttgtcttgtccccaccatcagaaatgcactcagtctatggtatcatgttattaattctctagtgaaaccatagtttgtatttagtaaaacaacaatgtacatttggctatttcaagcttaattgaatttctttggcctctacatgattcttccttgctgaaaaggataatttataacaaatatttcattacttataaagcaaacacttgcatttcagaatacctttgtatttcactttcaactctagaaaatatttgttaggaaagtataatttatgaactgttataatgctttagtttctattcatttatttgggatttaccatgtattgctttaaattttaagcaatttttatatgaattgcttctactctacactatgaacacaaattcaaagatagcctgtatttgtattaaatttctttgaatctcttaaggcaactagcataatgccttgtctcaataaatatatgtttattgctttagagaaaacaagtccattactattttcaaagttgaaattgcgttatatgtttaagctgccatttaaacagcactacattttgccataattttgctatagttaacattccaagtatattcaaagttgatttttatttttttcagaaaaaatgccttagtctgtttggtattgctacaaaagaacacctgagactgagtaatttgtaagaaaagaagtttgtttagctcacagttctgcaggctgagaagttcaacggcatgaccctggcttctggcaggggcttttattctgcatcataacatgacagagaaggtcaaagaggatgcagacatgtgtgaagaggggaaagtttgctaggcatcttagccctgtaacaacccactctggtggaaactacccatttcctcaagaactaatttagtttagtcttgcgagagtgagaacttactaccagaagaacaacaccaagccattcatgaaggatctgccctcataacccaaacacctcccaataggccctacctccacactggggatcaaatttcaatatgagttttgatgagaacaaaccaaccatattcaaagcattgcaaaaagttgaaaaagctctactaatgtgtaaccagacatgtgaacatatataactttgagacatagcacaacacttaaaagccttcagaatcataaaaaatgtatctatcaatcttaatattttattaactcaaattatttttacctggctgcatggacatacaacatttaccctaaatttaaaatagaatgcaaattaatattcattggtattattttcattaattgcacaacatagtgaaaataatgttaacatttttttcctttccttcttccttcttctcttttgctttttttcttacctgtaaattaactgagttgccagatatccatagttatcaatggcaatttggaggctctcagaggcagaagtggttggtgtttttctatttattgttctagatttgggtctgagcacttttataagtgaaactttccaggtattttgttgttgttgttgttgttatatcaggtcttaaactatacctttataaattcttagtcatatatactaaagggcatttaatctcacgactgttatttatgggctttaagtcctctatgcaaagggtaaaattgtccctgtgaatttcagaggtagacattaggtaaagagagagttttttgcttgacttattgcttaagtcagagcgttctctgaatcttctaactcttcatttaattcacttgaaagtatttattaatcaatgtgcctaatacatagatgggactgcttccagtgagtctgtcagtcatgttaccagagcctttatttcttcctctatgccaagcttaaaaaatcagatgatttattttacatgagccacacatgcaaatagacctgtaatgctgaaattttgatacttaaaggtaaatctagtatcagagagctctattaagtggtctagagtatattcaaattacaagacatgcaacttattctaaaatctaatgcaatctactaacagcaagggagagggaactattcagagtaaataggacattgtttatctgaaattttattgacacattaattgacaactccattttatatgacgtatacaatcaactggacctgtttaatgttagtccttagataaaaaataattgtagctcaagacctcataattgtatatatttttttcactgtacctggtacaatcatttcatgtatgaaatgaatgagtccacaatacctcaatatttgaacattttgttttaattcacttaatcattgaaccacagagtctgtgctaaatgctattatctctataactcaacaataaggagatttaacagactcaccatttaatgtgcacgggagcacagatttcaaaatttgtttcagcacaaccttttggattatcatatatttgtaccataaaataaatcatctgattttttactctactgagacggatgcatatgcaacatatttatgtgcatatattcagtgttggaaattaattcataatcatgtatatcaagtgatttggatatttacctgcaccccatctcagggaatcattagagcttgcatttggaacatttaactgattttagttatgtaatgtaattttacacacattaccttacatttcccttcaaattccttctgaatcacactgttctgatttcctggaaacgcagttcaagaaatggccaagagtagaaggatgttataagacattgagtttcgaagttttcctttaaaatacaaaaagtgaaaattccacaaaagtggaatgaaacttgatttatagtgccgcaaagaaaaatcctggaatgtgcaggaaaggaagtgaatgaacttgggaacagctgcaagtaagtatgatgaacgactctgcattgggctagcagttcatctgttccacttgcagctgcaggccaaagcgtcaccaggttttctgcagaaactcaacttggcattttaatggctgaggtgaacccactggtggccagctgctgggactgaaaatcagaagcagctccagtccttccagattgtgaggggaaaggttaaggagagggaagtggtgccttgtcccagacagacgcccattggtcctgagatttcaaaaacaccaggagagagaatgcctggcagtggagaaaccaacactcagccttctctggaagaaagaaaaggcttgaggcaggattctcaagcttcatttaattacgatcaaatagggactggcagaagagcgtagctgcagatttgcagtaactctccctaaaagaacatgagctgtgagagagtgaccttgcagccagcactgatttgacattcacctgtttccctgcttgcattggaataccgctgggttagtttggatcccaaacatagaaaagtaactcctagcaggaggcagaagagagcacttaacattatgcggccaagaggttacactggctgctgcctcttatcaatgggtctttcaggtcctttttgggagcaatcctgggcttcattgccctgcctaaactgtagtttccaagcagtttctcaggcagttcctgttacattctgtgatcctgcctaatacagtaatttgattccagttgaaaacttccattacatacatgtcttgaatcgggagagttagagccttatactttgttcctctgcaaaactgtaagagcatcactgctgtattaaagggaagtgagtggaaagttgcaaagtgagcctttgagttcaagaaaacagatgaaaatgagcccaagccttggaactacagttctaagttttgagtggtggacagagtgggaaaccacgtagcatgcaaaggggagcggaagggcagaggaaggaagcaaggctacagtgtttggctgtgttctaatgtgctctggcatggagttatcgtgagtggaactaatattacataacactatgtatattttggaagatggctgggaaatagcctttggagccaatggagatttattaaataaaaattacctcaagcttgatttttcatctttaccaagcaccatagtaaattggcatctctgagactcctgcgggagccagaaagctggaatcaaaaattcagaaacatgaaatcaagaaagaactgaaaatctgaatggaaagccagtcacaaaagaataagaagtaaaatattctttaattatgtattatctcctacagatcaaaaggaactttccaccatttcattgaacctgtgagtgaaaatgatcccaaaagtatagagaaaataaagaacagtaagcaaattaattcagtttatatactgtcttttaacctgtttagaaagaatttgagaattgtttgatcctgattatataaaaaagatatatctgtatctatgtctacgtatatattaatacatacaaataaaatttctagaaggaagagtacacaattaacagtggttacttctgaagaatgggaatgggatgttggaggagacagatctgtcacttttcattttatatttctctggtgagatcaagggagcatcttactttgtaaatattaaaaatgctgaaatatgtaggttaaaatgtaattaatctacattcctatttttcagaattaatctgacttaccatctggtcatttttgcttgcttacattttttcttttgcaaaactcattatgttgttttgctaaaaacaattaaaacaatgcatcaaactagtaagaaaaaaaaagtctcaaaccacagagaaagactcacaattaccattagatacataaaattctatgatatatttctttgtacatttctggatcaaataatggcaagatggatgaactgatggatagatggatatatagacatgcatcgatgtaggcagacagtaagatcatagtataattgatattttaatttaacagaaggttaaaactgaaattttgcttttagaggaactattgacctcaaataaatgttttattttcaccttaagacgtatctttttctaaaagatccaaagttaacttgaaaaacatggaagtcgatttttttttttttttttattttaacctatcaagctcaattgactccctctcataaaagtggaggcacagtggctcacgcctgtaatccccgcactctgggaggccgaggcgggcggatcacgaggtcaggagatcgagaccatcctggctaacaaggtgaaatcccgtctctagtaaaaaatacaaaaaattagccgggcctggtggcgggcgcctgtagtcccagctactcggggctgaggcaggagaatggcgtgaacccgggaggcggagcttgcagtgagccgagatcccgccgctgcattacggcctggccgagagagcgagactccgtctaaaaaaaaaaaaaaaaaaagtgaagatattgccacaggtctcaggtcctctttccctgcttcactttctattagttttatcagttaggtttacatttactaagtttagagcatatacaatctttttttctttttttttttttgagacggagtctcgctctgtcgcccaggctggagtgcagcggcaggatctcgactcactgcaagctccgcctaccagattcacgccattctcctgcctcagaccccggagtagccgggactacaggcgcctgtgcaatctctatggtaaccacatttcccagttgactactaccggtaataaaatcaaatggattcagtgctcacaactcttcagtctttgggctactttccattcttgaatttttagctgaattcatctctttggctggattttgtggtaaagtagttttttgcttattttttcccccaagaagggcttacatgggtctttttctatgaattattttcctacttgacaatatttacttgttacttttttactttcatcatgccttgggcgcatataatactctcccttcacattttctttccttgaatttgtggagaattttccattttattcttgcagtcaactttactgaaaacaaatctgaaataaaattaatgttattctaccgtataggcgattggctttttagtcccaagatgcctaaaaataagttacccttaacacataatagcttaacttagttaggtctagaaattgagggtttgttttgtaccacattttctagaaagagtgctccttcaacctaaagatttacttagctttttttcaggaaatttcttggattagatcttagaataaatatttattttcatttgttaaattctctacttcaggaatatctgttaacattgtgttggatttttttgtttaaagtattcacttttctctaattgcttttatctccttatctgttcatcttccttcactataattatcttaatccccatttctctgtatcagtaacttaattttcaattgcatccattgtttttctaatttatgtattagtttcataaggctattgttttgagttctttcccccttatatcggtactctcctttatcatctaattctgttattctattattttgtctttgaattttgttttagtgaacttacattcctctattatattacattatattagaattagtagttttgagtaggttggttcatgagtttgtgagtagggtagtttcaagtagggttgagtagtatttttatgtttcttgtgataattttgccaaacaatgaatatttctttttagtataaagatgtctcatggaatatttaggacatgtatatgctaaaatttatttgttgcttatatgaatttcaaattgagctgggtgtctctatttttatattttaatttgctaaatctgtatgttttttataaatttccttccttccctccttccttccttccttccttccttccttccttccttccttccttccttccttccctccctccctccctccctaatctaggaggattttatagttgccatagcgttttcttttctttttgctcatgcttgtgtgtccctaagatgccaagttaggtgggatatattgtaggtggcctcttgactctcttctcaccatactgtttgttttctttacttaatatacagtctgagaactgaatttactttcatggattatctgtttgtctgtaatctatgggaatactgggtgatgaaggcagggatctagtcttagatactctgcagccttttctctgtctcctaagatattttttctgtgcaatgggagaggggtttttgtccaatcccctgggaaatactataaatgaataatttctcaaatttgctgtgtattcttgaatcttcactctcttcaaagagacttaagccactatttcattccgggtaggagcagctaaactaaactaacagaaaagctacaaattacagtggcttaaaaaacaaaggacatttttcttgcttgggtaaagtttcatttatttttccctctatttcattgccatgacttttagggagcagtgacttctaaattgtggttcttaatcaactagagtttatagtttgtctaacattttaaaaatataatcagtttctttactactatttttatattactaattcattaattttcacccaaatctttaagaacatggctctcatggttagggaaagaaaattgcgcaaaggacttgtgtccataccgtttttttggcctcactattcctgaatgtggtttctttcttctaatgaccaaactttaggggactaggactgtgcatctcagaattaaactggtatttctgatatgtatggtttatggttcaatggaaaaatataagaatttttcaaataattttctgattgtaaggatgaatgtgacctaatgttaaaatggcaggacagaaatattaaagaactgaatgatggcatcagctcagccatttagtatttgattttggacttagtttcctcatctgtataataagagctttgcctatgtatttttccaagaccatttcagggttttgcattattttatttcatttggaattaacattcaggtcatcttatagtagtgtactgaataactgaatgttaaatgtcttgctaaaataaatattgggttggtgaagttgaagttttggaataatagctaaaattaataactatagattttaattaatgatttcattcactaactttcaaaagttagacattcaaaaactgcaagaagaatattttttcaagattataaattgctagattcttcctgcagtggaaaggggaacatgagatatttgcagtattaaatagatactcactttcaattgatacatttaataacatcactaaccttcctattcatagtgaaatgagtgatgaaaaagttttttagtaaatattttttactggaacagaaataattttgtagcaggattcataatttgtgtatactgatttaagaatatcattacttcctgaaagtggcattcatctctatgggtagtcattttaacaaggtttttgttaaaaccttccccttcattaacacactttaggaaagtgtcttctaagtcattctatcaaagtctgttgctttcaaatttgattaaagaaaacaaagtattatttgcgtacctcatttttctctaacacatttttctttgcatttctcatattctggattatgtggggatcaaatatgatttaaatgttatgcacaattttgtggtttttcctactaatgaaattttgagttgcaaagttaacattctgccattgttaatatattcttattataaaaagacaaaatttcaacacatttcatttaaagatctcaattggcttttacttgcaattccagaatcgggcagccattagaaccaaaacagttctgaggagctcccaggctgcaatgtggtgcgaaatgttttatggacagaaaatggaaatgaggtgcagaaattggaggtgagattcagagatagctgattggttacagctcagcctttgccttgtttgaacatggtttgaacagttgattgactgaagctaggctgctgtgattggctgatactttactatttgttacaaaggcaaattcctaatttaagctttcaaattgtttaagtactaagttaggttttactttgttacttaggactcatatcgaggtttctaaagcccacatctgatacgatttaacattacctatgtgaagaattactaagcagaaacattttgaaagcctcatgacctgaatcgtattaaatacttaacaattgaatttgtctcaataataattatgtttaaaattatgaatgctggtttgtaaaaaaaaaagccacaaattttaaaattctgatataatctaatatctggtattcagctttgtattatcattttaaaatttaatgaacatctctggactctaaatatttttctttttaaagttatataaaacattctctttatattcattataactattaaactatttgcctacttatttatattgaaagtccttaatatttttacaataatttaataggtttcacaatcatcattacttattatagtttatactgtttgaataataaatatatgtctatactatgactcattgatacatttcaaaatacagtgcacataagaagatcttcattctctagatctgtcatactacatatgtgaaagttaacatttgtagtggcagtgaatcctaggggcagccttgcatgttaatgttatgtggttgatttgagaggatggggatctgtgtaatcatatgatgacaatttgggtttgggaatctcagaaatgccatcagtataggaatatggctattctgctcttcctaggctaagaataaacttgaagacaaagagtagattttggccagacactgatgctaaagtcaccccgatgctgtctttgcttctaaggtataaattaccttattttaagcaactttttcaccttttcaactctatccctttcctcagcctctttcatatgtgaaataaaatattcacttactactgaggatgattttttttaaacctattaaagaatactccatagctacagaggggaccatatcctttagagactccgttggggatgatcatatgcagaattattcttgtccctttgcctctgcttaatccccttcacaaagtctgtggctcaaacaaatgagagttggcagtactaaaggaataagttcccagcatacgtctgccatgctttagcatcatttcagattagaagcatggagcaaaggcagggagacgggtcaaacaaaatgctgagagcttccctccttttaaaaaacaaaattctagtcagggaattatttttaaataaaatgcaagcccccaagacataaataaacagccagcatataatactaacaactcaatgaaagatacttccccaggtcaactcatctggtaggatcagttattttgtgttactgcattgcccctctagcgggatcatagaagaccctaaaggctacaagaagaactgctttctggctctcaagtcatttcagtggttccctgatggcagctgtctctttggggaggtggtgccgtggtctgtttggggttaggccatcagcacaggccccttgtgctagcatcacattgtcataagctttctgctaccatggctaccatccatcaccaggctctgtctccatgggcagcagcctctgtgcccaggccaccccaggacctcaggcccatctctctttccaaaggtaggtaggtggccttttcccattctttagtttttgactttgtataactgaagcttctcctgggatgatgcaggcagctgctgcacagtcactccagacttactcttcactttgttgttaggcccctgcagctcgctgcacgtgactggtgccatctgccctccccgcacgggcagctgcccctcccacactgcctatttccccctttctgctttttgtagccacatgtctaaagatggcaggccagtctctgtggtctattttatgggactttcatttataactaggcagcaacccacattagttatttatcctgatgatctccctcctcttgccccccatgacaggccccagtgtgtgttgttcccctccctgtgtccatgtgttcttattgttcagctcctacttataagtgagaacgtgtggtatttggttttctgttcctgcattagtttgctgaggataatggcttccagctccatccatgtccctgcaaaggacatgatctcattccttttaatggctgcatagtattccatggtgtatatgtagcacattttctttatccagcctatcattgatgggcatttgggtggattccatgtctttgctatcgtgactagtgctgcagtgaacatacacgtgcatgtatctttgtaataaaatgatttatatcttggggggtagatacccagtaatgggattgctgggtcaaatgatatttctggttttagatatcacaacaccatcttccacaatgattgaactggtttacattcccaccaacattgtaaaagcattcctatttctccccaacttgccagcacctgtcatttcttgactttttaataatctccattctaattggcatgagatagtatctcattgtggttttgatttgcatttctctagtgatcagtgaggttgaacttttttcatatgtttgttagctgcatgaatgtcttcttttttttttcttttattttcttttttttgagacaaagtctcacagtgtcgttcaggctggagtggtgcagtggcaccatcttagctcaccgcaatctccaccttccagcttcaagcaattctcctgcctcagcctccgaagtagctgggattataggcacctgccactatgcccagatacttttttcgtatttttagtagagatggggtttcaccatattagctaggctgatctcaagctcctgacctcaggtgatccacctgcctcagcctcccaaagtgctggggttacaggcatgagctgcctcactcagccatgaatatcttcttttgagaagtgtctgttcatgtcctttgcccacaattgtattgttagtttttttcttgtgaatgtgtttaagttccttgtagattctgggtgttagacctttgtcagatggatagattgaaaaaattttctcccactgtgtaggttacctgttcactctaatgaaaatttcttttgctgtgcagaagctctttagtttaattagatctcatttttaaatttctgcttttgttgcaactgctgttggcaattttgtcatgaaatctttgtgcccatgtcctaaatggtattgcctagattttctagggtttttatagttttggggtttacatgtaagtctttattccatcttgagttaatttttgtgtaaggtgtaaggaaggggtacagtttcaattttctgcatatggctagccagttcttccagcaccatttattaagtagggtatcctttccccattgcttgtttttgtcaggtttgtcaaagatcagatggttgtggatgtgcagtctattttttttttttttttttttggagacagagtctcgctcttctgcccaggctggagtgcagtggcaggatcttggctcactgcaagctccacctcccgggtttacaccattctcctgcctcagcctcccgagtagatgggactacaggcacccaccaccatgcctggagatgtgcagtcttatttctgagttctctattctgttccattggtctatgtgtctgtttttgtactagtaccatgctgttttggttacagtagctttgtaatatagtttgaagttgtatagcatgatgcctccaggtttgctctttttgcttaggatagtcttggctgtatgagctcttttgtagttttatataaattttaaagtagtttcttctaattctatgaagaatgtcaattgtattttaatggaaatagtattgaatctataaattactttgggtgttatggctattttcacagtattgattcttcctatccatgattatggaatgtttttccatttgtttgtgtcctctcttttttccttgaacattggtttgtagttgtccttgaagaggtccttcacttcccttgttagctgtattcctagatattttattatctttatagcaattgtgaataggagttcatattcattatttggctctctgcttgttattgttggtgtatagaatgcttgtgacttttgcacattgattttgtgtcctgagactttgctgaagttgcctatcagcttaagaagcttttgagctgagacaatggagttttccagatatagggtcatgtcatctacagacaaagacaatttgacttcctttcttcctatttgaatatcacttatttctttctctttgcctgattgctctggccataactttgaatactatgttgaataggagtgttgagagatggcttccttgtcttgtgttggttttcaaggggaatgattccagcttttgcctattcagtatgatattggctgtaggtttgttataaatggctcttattattttgaggtatgttccttcaaaacctagtttattgagagtttttaacatgaagggatgttgaattttattgaaggccttttctgcttctattgaaataatcatgtggtttttgtcattggttctgtttatgtgatgaattatgtttattgatttgcatatgttgaacaagccttgcataccaacaattaagccaactttatcatggtggataagctttttgatgtactgctggattcagtttgccagtattttattgaaaatttttgcatcaatgttcatcagggttattggcctgaagttttctttttttgctgttatctcttccgggtttggtatcaggatgatgctgccctcatgaaatgagttagggaggagtccctctttcaattgtttggaatagtttcagaagaaagtgtatcagtttctctttgtacctctgatagaattcagctgtagaccagtctattcctgggcattatttggttggtaggctatttattactgcctcaatttcagagcttgttattggtctactcaagaattcaacttcttactggttcagtcttgggagggtgtatgtatccaggaatttatgcatttcttctagattttctagtttatttgcatagaggtgttaatagtatcctctgatggttgtttgtatttctgtggggtcagtggtgatatccctttatcatttttcattgtgtctatttgattttctctcttttcttctttattagtctagctagtggtctatttttaattttttttttcaaaaaaacagctcctggattcattgactatttttaaaggttttttgtgtctttattgccttcagttctgctctgagcttggttatttcttgtcttctgctagctttgtggtttgtttactcttggttctctagatcctttagttgtggtgttaggatgtcaatttgagatttttctagcttttcaatgtgggcatttagtggtatacatttccctcttaacactgctttagctgtgtcccagatattctgatatgttgtctgtttgttctcactcatttcaaagaacttcttgatttctgccttaatttcattatctacccaggtgtcattcaggagcaggttgttcaatttcgatgtagttgtgtggttttgagtgagtttcttgagttctgatttgattgtgctgtggtctaagagactgtttgttgttatttcagttcttttgcatttgctgaggagtgatttactttcaattatttgatcatttttagagtaagtgacatgtggcaccgagaagaatgtatattctgttgttttggggtggagagttctatcgatatctatcaagtccacttgatccagagctgagttcaagttctgattatctttgttaattttctgtcttgatgatctgcctaatattgacagtggggtgttaaagtatccccacaattattgtgtgggagtctaagtctctttgtatgtctcaacttgctatatgaatcagggtgctcctgtattgggtgcataaatatttaggatagttaacttttcttgttgtccccttcaccattatgtaatgcctgcccttatttgtcttttttgatctttgttggtttaaagtctgttttgtcagaaactaggatttcaacccctgcttttttctgttttccacttgcttggtaaattttcctccatccctttattttgggtctctgtgcagctttacatgtgagatgggtctctttaatacagcacactgatgaatcttgactctttatccagctttccattcttttagttggggcatttagcccatttacatttaagggtaatattgttatgtgtgaatttgatcctgtcattatgatgctagctggttatttgcagacttttttgatgaagttgcttcatagtgtcattagtctgtgtactccactgtgtttttatagtggctggtaacaggttttcacttccatatttagtgcttccttcaggaactcttgcaaggcaggcctggtggtgacaaactccctcagcatttgcttatctgaaaaggattttatttctcctttacttatgaagcttagtttgaccagatatgacattgtaggttggaaattcttttcttcaagaatgttgactattgccccaatctcttctggctttttgggtttctgctgagaggtctgctgttagtctgatgggcttttcttcataagtgacctggcctttttctctggctacctttgacgtatttttcttcattttgacattgaagaatctaatgactatgtgtcttggggttgttcttctcatggagtatcttactggggttctctggatttcctgagtttaaatgttgccctttcttgctaggttggggaagttctcctgggtgataccctaaagtatattttccaacttgattctgttcttcctgtttctttcaggtaccccagtcagcggtaggttcagtcttttaacataatcccatagttcacagaggttttgttcattccttttcattcttttttctctaatcttggctgcctgctttatttcggcaagatagtcttcaagctctgatatcctttttttccacttggtctattcagttattgatactcgtggttgcattgtgaagttctcatgttatgttttttcagctccatcaggtcatttctgtcctctctgagctggtgattttggttaacagctcctgtaatattttatcatggttcttagcttctttgcaatggattaggacatacttctttagctcagtgaagtttgttattacccatcttctgaagcctacttctgtcaattcatccatctcagcctcagctcagttcagggcccttactggagatatgttatgatcatttgaaggagaagaggcactctggctttttgagttttcaatgtttttgcattgattctttctcatctgcatgggtttatttacctttgatctttgaggctgctgacctttggatgaggtttttatgggttctttttaattgatattgttgtcctggctttctgtttgtttttcttttagcagtcaggaccttcttacatagggctgcagccatttgctgggggtccacttcagaccctattcacctggggtcctcccacacctggaggaatcaccagtggaggctgcacaacagcaaagatggcagagtgctccttttccccaagaggagcaccaacctgatgctggccagagtgctcctgtatgaggtgtatggagacccctgttgggaagtctcaccgactcaggaggaacaggatcagggacccgcttaaataaacagcctggcttcctcttggcggagagggtgtcctgcactcaggagaatccgcctcatcagggctgccctgactctccagagctggcaggcagaaaagagtaagattgttgattcacgataccgcagccgcccctcctcctatgggctcctttcagggagatcagagttctgttcataaacccctggctagggatgctgaaaatcccacagggaggccccacgcaggtaggaggaatgggtcaaggttctgcttaaagaagcagtctggccaggaactgtccacagctgctgtgctgcgctgtggggaattgctcccgttccaaactgcccagtctcgctggcacctgcagcagggaaaaacggctgactggagcagcagtggtggtagccaccccttcccccaccgaactcggtcttcttaggctgtctccaacctgctacactggctgacagggattccaaagtgggtttcagtttgtagggttccaagggagcagggccgctgagcaaggccgcttggctccctagcttcagcccccttcccacaggagtggacggatctcctgcctccttagttttcccagagctagagtatgcaaaaactcttatgtctcagtgtctgcccaagtggtcgcccacctgagcagccgctgtgagcctgcacagctctgtgttttggacccaaggcccttggtggtgtgggctcacaagggcgtgggttgcagagatccatgggaaaagcgtgcttttcagagctgggtagcacaatacctcaccagcttcctcggctcagagagggagcaccttttgccgcacgcaggctccgggtgggccctcgctccaccctgcttttcctcactgtctgtgggttgcgccaaccatctagtcagtcccaattagagaacctgggtacctcaattgaagatgcagaatttacttgctctttttgttcttggtggaagctgcagactggagctgtttctatttggccatcttggctcaaggttcagtttgagtttctgttgcagacactgcaagaaacagaaccgaatgaacaagagatatgaaagtatgtatcatggcaataactgtttctgtttatttcttattttgttttattttgctttctaatagaattggaggaaataggaagtatttaaaaagtgtttaaatttaccatcaattattcctgtatagttctctatttttaaaaatatgcccccaagttttgaaattctgattcaatacggactttgaaaggatgtgaaatttgggagcacgtattgctgttactaagactgggggctgtgagagggcttggtgttcccccaagcagtcaggcttgcagagagaatttgtgtcctgctacggtcttttgtaaaggaagctagccccacctgttgttcaaattcattttgcttgcgtgaaagaggaatgctgtccctggaaacctctgtccaagtgcctgttttttctgttgtgggcagcattgcaaaagtgatctgtatcctctcagaaaaaggaaaaaaaaatcacatctaaaaatgttcaatgtcattacattgaacactgaccggacaagtaagctggaactgtatggttatattcacaaattctgggatgtttgttttggctttgtgttataattgcagctacgaaactaaaagtgaacaaattgctttctcatttaatttctttttatcatgtctaagtctcagtatttttatttgtagaattgtgttaataataatccacaggcttactatgaggaataaatcagatactgtacataaaacaaataggatatttgttgacatatagtattcattcaccagatgcttaatctttccttcctcttgtctatgttagcctgcgattgttattctagtgttggtctcaaataacttaaactgtcattagaattttgctttaattcatagggccaatagaggaggaggcaatggaaaaatcactaggtatgtttgcttagtctctcagatgctatagcacacaactctcagagacttggaaaaatggaaacacagagatgttgttttgtgttttgtttttgagcacagttcttatagtaaatgtgaatgtttactattatttctagggtttatgataaaagatggaaaagagaggctatactgatgaacgttgtcaacatgggggcttgtcagaaattaaacaaacttttaagaaagtaattgaatttaacaaacattattgagtaccttatctggcccaggcatggatcttaacctcaactcctcatcaagggtagaaagtagactcagtcaatgctaggcatggtggttcatgcctgttattccagtgcttttggaagccaaggcaggacgatcgcttgagaccaggagttcgagaccagcctgggccataaaccaagaccttatcgctacaaaatagaaaaaaaaaaaattagccggaaatggtggtgtgtgaatgtagtccaagctacttggggctgaggtgggaggattgcttgaaccgaagagtttgagcctgcagtgagccattatcacaccactgcactccagcctaggtgacagagccagatcctgtctcaaaaccagaaaacaacaaaacaaacagacaaaaaacagactctttctagtcatgactttattccagtgcttaccacctggtccttgccctcagagttcacaataaagggattctggtctgggaagaaagcaactttaaagaatttctatcatcattctcataataccaataaactccaaaaaagagcctaaagattttcaaatgaccttccttagaagttctagatcctagttgattacctgagcaaccatttgcctatgtgtatttcaatttaaattgtcataaacagctactcaaggaattgattaatctgaattcaaaaataacttttatttagtgaaagtcaaagcacattattgtgttttaaaaagtcaaatgttgccaactcatgacttagttaagcctggaatatgaatgtgcaattgaagcagacattggctgtatgcacaatgcctgctgtttttcttgctgttagtcattatatgttatgtcctttgtcaggttggaaacaaaagattaatttcatttggtaggcttttaaaaatgtgtttgtctggttgtgtgtgtgtgtgtatatgtatatatgcatatatacacatatatacacgtatgtatgtatatatatgtatgtatatatgtatatatgtatatacacacacacatatataaatttagttctgaaatttaggcatatatatatatatatatatatatatgaaatttaggcgcatatatatatatatatatgcgcctaaatttcagcactaaatattaaagtttaggcttaaagtaccaagatatttttttcagagatggattattttagcactaaaattcttctgagccttcagtattgctgagctttatttaggaaatactcagtgatagaagatgaatgcaaaaaaaattgattaaaaaccggagccttaaaaattgaattcccttcttactgttgatgttcttatattattttggtatctacataaatgattatttgaaaaaatttctgacatctgatgatgtgtaacatgccaaattaatttccgaatgttaaaaatcattttacttatggataacttcattatgtagaagctgactatctaatttgtaattatttttatagaaaaatggcaagtagaagcttatcatgggtgaagttaacaacaaaaggctaaaatttatttgtctctcttcagtctttttctcttcagtcaaagacaacttacacacaacaagatttctccttcttaattactacatttattatggtatttaccctgttcaaaaagccttagtgaggttccagctttgaataagatagagtaaacatactgtgccctgtctgtcctactgaatacaactatcaaacctggacaaaacacatgaattatattttcaaggactctgaaaagtgaattgtagcagacggactgagaaagaccagacctgaaaataaaacaaaaccaggcgtgagtttaccatgtttatcctctggaggaacccagctttgacttgggaagctcagaagtagacatcaacacaggcaggaagagcttcacctggcagtgacggtgacagcagctgagggtccccaggtttctaaagctctcaggacgagaaagtaggtcccaagataaggagcctaaagggcttttttctttctgtgtattccttcttggcctccaacatgggtacagtcacaagagcatgtaacagagaagaaggaatagacctaccattttctagataaagaattggaaagaggatccacaggtaaccaaaaagtaccagggaaatggcagagaaggaaaacctcaggagaccaacctcataagtggtatttattagtgcctgggctcaaatccaaattgtacatgaatatgtctggtcctagatagggtaccgaagactttgaaagtgaattttggtatatcattgcccagattccagactggctattgtgtgacacaacatacaggatatatctgaatagtgctcagaagagtttgaaaatgcaaatgatattaaaataaagatgaaaaagagaaagctggtcagaacttgtggacataacccttctggatctgttgcctgattaaaaaatagttgatattctcgaatgaattaaaacaagatttagagactgagcatggtagctcattcttgtaatccaagcactttgggagggcaaggcaagagaattgcttgcggccaggagtttgagaccagcttggccaacagtgagaccaggttgctaggaaaaagaaaaaataaaaaaataaaaagctgggcatagtggcatgtgcctgtagtcacagctacttgggaggcttaggcaggaggattacttgagctgaggatgtcgaggctgcagtgagcacatcactgcactccagcttgggtgatagagcaagacctaaaaattaaaaaaaacaaaaaacaagacttagagtctcataatattcagtaagtctagcatataatgaaaaattgctcagcatatgaagaactaggaaaatttcaacttgcatgggaaatccaacctacattaacactgagatgacagatcttggaattacctgactgactctaaagcagctgttattaaaatgttccaatgagtaagggcaaatctctttatatgaattgaaaggaagaaggtctcaacaaagaaataaaagaaatacagacattttatggtaactttagaactaaaaaacacaataactcaattaaaaaaaaactcattggaaggctccatgaaagtgacagaggaagaattggtgaatttgaagatagattgatagaaattatttcatatgaacaacacagagaaacatgatttcaaaaaaaatgaacatagcttcaggaagctgaaggacaacataaaaaggtctgatatgtatggctttgaaaatccagaaaggtagaaagagtgcagtgtgtgtgtgtgtgtgtgtgtgtgtgtatgaacatgtacacaaacgtatataaacacccttatgtttgaagaaataatggctgaaacatcccaaattagccaaatcacataaacctacagattcaaggacctcagaaaactcaaaataaacacaaataaatccatgcccaaagacatcataatgaaactgctgaaaactaaagacaaagagaaaccttgaaaaaagcctgaaaaaaaatgatatgttccttgtggagaaaaatctatttaaataacttcaaatttcttgtcaaatttcacagaagctaaaaagaaatcaaccaacattttttaaatgctggaggaaaagaactgtcaagtaaaaatattatatccaacaaaaacctcctcaggaattaaggcaaaataaagacattctcagattaaaaacaaaataagacaaaacaaaacaaaacaaaaacccaaagataccctctaaaaagtttgctgaagaaattcttcacacacaagaaaataaactgaagagcaagtttcatgaaagaacagcagaaatggtaactatataaataaatatagtacatatcatccttttcttgagttatttaaaacacttgagagtcaaaagcaaaaatatgacattggctgatacagtttttatccagtatgcatatttaatttaaatatctactataatataaaaggacctatatgatggtagtaggattcctgcattctacttgaaaaagtaaagtattgattctaaatataacatgaaaattaagcatgtatatagcaatccctggagcaaccaccaaaatttttttttgtatacacaaagagatacagtaaaaaacctgatatacttcggtggaatgctaaaaataatccaataacacaaaataagacagaaaagctaaaacagaggaataaaaatcagaaacaaccagcagaaaacaaataatgaaatggtagacttaaatccaagcatatctatacttgcattaaatgtaaatggtctaaagggccaatttaaaggctaatgattaccagaataaataaagaaaaatgtatgatgcagcaatatgctatgtacaaaaaatcactttaaaataatgacaaaggtatgcccaaagtaaaaaggtgggaactataaaccatgcaaacattaaataaaacaatactcaggttgctatatcaatattagacaaaatagacttcaaagcaaggaaaatgactgggaataaagatgacattaaataataataaaaagaacaatttactaagaagacataacaaccttaactatgtctgtagcaaacagcatagcatcaaaatacgtgaagtagaaactaacaaaaatgaaaggacaaacagaaatattcacaattatactttgaagattcaacagtactttctagaaaattgacagaactagtaaacagaaaatatgccttgatatagaaaagctgaaggaaaaaaccaactgactgaatatagttgatgtttttctcactctactccaaaacaatagaataggcattcttttcaagtgcacgtggaataatattacatttatgaagatagacctcattctaaataataaaacaaatttatggcaagttcatggaattgaagtcacacaaaatatgttttttgtccatagtgtaattaaattagaaataaatgacagatgccaggggaaaaaaattccgaacagtttgaaattcaacaatacacttctaaatactctacagtcaaagaagaagtgtcaaaaaaaaataaattatttcaaactgcatagaaatgaaagtacagcatatcaaatttgtggaatgtctgcaaagcaatgtttggaataaaatttattatgtaaaatgctcatgttatgagaaaataagttctcaaatcaataatataagcagccaccttaagaacttacataaagaaaagcaaaaaaaaaaaaaaaaaacacacacacacaaagcaatcagaagtaaaaataataaagagcatacatcaataaaactgaaatcagaaaaacagtagaacaaattaatgaaaccaacaggtggttcttgaaagagattaatcaaattgatgaacctcttgcaagactgacaggaacaaagataaaacacacaatatcagaaatggaagaatcaccactactgacaccatagcattaaaagcataagaaggttatgtgtttatttatgtataatagcaataaataattagcaagcacaacttaattagtaatttcacttaaaatagctttcagaatgtgaagcacttagacataaacctaacaaaacatgtacaagatatgtatgctaaaaactacaaaccctcatgaaaaaatcatagatgacctaaatgaatggagacatgtaccttgttcatggattaaaacactaaacttgttaagcatgttaattctactgagttgatctatagatttaatgcaactccagtcaaaatcacagtagaatattttgtagatatagacaagctagtgctaaaattcatatgaaaaggcaaaggaactagaacagccaaagcacttcttgaaagaaatggagaaattatgtgctcaattttaagaattattaaaaagcttcagtaatcaagagtctggtatcagagacgagatcagtgggtcccatagatcaatgggacataaatagacctgcataaatatgccaactcatctttaataaagatgcaaaagcaacttactgcagaaagggtaatgttctaacaaatagtaatggaacaataggaaacaattggtatacagaagaaaatgcaacctaatcctcacatattatgcaaaaagaagctcaaaatggatcgtagatttaaatgtaaaacacaaaattataaaatgtttagaagaaaatcttcatgacctagagttagggagtgagtttgggcatatctaagaagaaaatatatgtatatatttgataatttaaattggactttatacaaatttaaaacttttgctctgtaaaagacactataagagagtgaaaagataagctatagacagaaataaaatcttttcaaatttcatattcttcaaggggtttgcattcaagatatatttgaaaactcttaaaaatcaatggcaaaaatacaaagaacacgatttaaaagtgggcaaaagtcttgaacagattgtcgaccaaagtagatatggggaaggtaatcaaacagaactatgtgcaacatcattagcttaacttagggaaatgcaactaaaatgataatgccatagcactagaatgataattataaaaagaaaacaaaacgaaagaccctttcactaccaactgctggtaaggatgtggagcaactagacttcttatacgttgattatagggatacaaaatggcaaagctgcttgaaaaatgggttggcaatttctcagaaaggtgaacaaatgcttatcatatgacccatacatgccattccttagtatttatgctagcaaactttaaatttatgttcacaaaaaaccatatgtgaatatttatagtagctttgttcatatttgtcaaaaattgacaatcatcaaaatgccattcaacaggtgaatagaaaaacaaactgtggtatctgactacttcttgtcaattaaaaggaatgaattattgatttgtgcaacaacttggatgaatttcaaaggcattatacagaatgaaagaagtcaacctcaaaaagtttacctaccatatcatatagaatttcaacaaggcagagttatggtggaacgaaatcagtgagtgccaggggttggggtgggggaaaagtgtgactacaaggagatagcatgggaggttttgggggaactgatggagctgttccacatcttgattctcatggtgattatataaatctatgcatgtgatataattcataaaactatgatttatatgactataaattaattttaaaaataaaactagaagaaaaaagtcttcccaatgcttgactattgcttttagattatcctctaaactccatagcaggcaatgaatggcttccattctctggctacactcattttcccaacgtatttttttgcccagcattgttgtgaatctgttctcagtgtctcactcactttagtttttctctattccctaaagatccgagttataatatacaacctcaccaatgctgattatttgagaccagcagcatatctggagctggttaactgacagatgtgattggttggaactttacctaattcacccaaggcacatttggttttcaaagacttgaaaagggatcaatgttctcatctgtgaggttttaagacttttgtaggcgaggatgaatttcattctactgacaacctgaacgttttttcatgatttcaatacccctataaaaagataaaggcagctgggaatacttactctagaagaaatatggttgaaaggagaatataaaccattcacataaatggtaaataagtatttgtcatcttaactaaggatacaaaaaaaaggaagtgtgcatcaattataccatgatggattaattgtgctgtatggaaaaatttcctattaaggaaatttgtttaccttcctgaaaagtgtggctgaggttggtcacagagttgttctctagatctctttaaggatagattcctttttattttttaattgacaaaataaattttatttacttactgtgtacaacattgatgttttcaaatatatatacattatgaaatgactaaattttatcaaattaacatatgtattacattagatagttaccatttttgtggtgagaacactttacatttactcttttttttttaagaatacaatgtatcattaatgatagtcaccatggtacaataaatatctgtaatttattcctcctatctaactgaaattatgtatcctttaaccgacatcttcctaacacctccaatcagttcaatccaccattctgttctctcctatgagatcagcttttttagattctgagtatgagtgagatcatgcaatatttgtctttctgtgcctggattatttcacttaatacaatgtcctccaggctcatccatcttaattgcaaatgagaggatttccttctttattacagttgaatagtattttattttgtatatgtaacacatttcctttatccattcatccactgatggacactgaggttaatgtcatatcttgactattgtgaatggtgctgcagtaaacacggtaaacacggaagtgtaaaatatctctttgaaatacttatttcatatatatgtatgtatatatatgtatacatacatgtacatatatattcatacatatatgtatgtatatacatatgtacatgtatgtatgtatgaatatacatatatgcatgtatacatatatatgtatgaatatatatacatgtacatgaatatgaatatatgtacatgcatatgtacacatatatacatacatatatatatatatatatatatatatatatatatatatagtggtgggattgctggatcatatggtagttctgtttttaattttctgagaaaccttcacgctgttttccataatggttacactaatttccattcccaccagcaatgcacaagagtcccctttcctccacatcctcactagcacttgttatgttttgtctttttggtaaaagccattctaataggtgtgaggtgatatcgcattgtgacgttaatttgcgtttatccagtgattagtgatgttgagcatttttcatatgcccgatggccacttgtatgtctttttttgagaagtgtctattcagatattttgcccgttttttaatcgggttgttttgttgctgttgagttgtttgagttccttatatattttggatatgaaccccttatcaaatgtatattttacaaatatgttttcccataggatagatttttaaccgtttgggatggtttaagggaggccaaatggaaagcctaaaaaaagagcattctgtggctccatggtggattctggcatacttttttcaggatgctcttttccaggtcaatatttaaagaacttgaagaccgcaaagcttctgctcttgagatgagaaggagcttctcctccactaatgatctgaatttaacactggatcacttaaagccaggttcatttgcaaaatatttgctcagctttgatgctataaaagcctctccaaagctaaggaaaccctgagaaatggattattcatgtgactctgcagagcttggtatcaggcattgcttgtatttaatctttccctaagcattaacattctaagcttatgaaaaatttgtgacgtatgctaaatatattccatccagttatgatcagagtccagtcacctgagtgtaagatttctgccctttcagtgagaattgagagccctggtgaaggcagatagaaaagcccagaaacacttgttgttttatttatttttcattgagcctctggctaatttttgataaggtgtcacagatttaatcagttttagtttaaatagaagattgagaaatactatcttcttttcattaccattagaaagaaaccttaaagcttaattttgactgcatgaaatgatatctaacagcaaatatttgtaattggtgtattccagatacttgtagtgtaggaaatacaatattgttttctttaaaaggaaattgggtgtgtataaaacatcagaggaaacaaatttaaggcaagattctgaatgacagttctgtattctacaaacctttgctaatgaaagggaagatgatgattttcaatgtaggtcatggcctgaagtggagaatttctgaaattgtcattgcagaccctccaatcagcctgatctgtctctgcaacactcctgatgagctctgagccttctcagtgctatgagtatttacatcaggcagaggtgggttgggatccaaagcttacccaccctaatatgagtaagatgattctattacattcatcctagagagaatatccttcatagaaatagaggaagaaaaagcttgcatttggttaggaatatagattatgaagagcctccttatcytgaaagctgagataatatctgtatcatatgtggtaacaaaaaataaggttatttgtataaagaagttagcatataggaaggtatatagtaaagtgcttcataatggcaggaaggaaagaaatattgaaggaaaaatttaaaagacattgcgtcagttggtatctgtttttggcaagtaaacaaacaaaatatattttctcttttctgccagtagataggttaggaagcagctggaaggtaacatcgtgtctgacttctaggatatcacaccttcaatgagttattgttttattgttccttgggagcttccactgaacgtggtgttctgtcacttctgaaactctggggatttcttttcatgatagaaaattgacaactagtatttttttaatcatagaaggtaagaattgtgcttattgaccaaacatgtgatcaaaagtggttagaaagtctttagcaggtgtaccataaatgcctgccaccttcccatttccacacctccacagacagcttcttgtgaataccccctccacacatacccaaccatacatagtgttctctctgctaagaagaaaactgtatacagaccacatgacctcacctcactttcattctcctccgtacccaaagctgagactatggtggccagtcatttgtaagctgtctaggcacctttgacatggcattgtttgaaaagataagaggttatctttggggaatttggtatgaaggaacaaagcaatgagcagtgaagatgaaagtttatgtgacagaggctgagatagccatcatggggaatgatttaagctgaaattgtgggaaagtagaaagtatgactatgaataagtgtaatgtataacataaagacagatgatttataacacagagaaaatattacagatcagaaaatgaaaaagccaaaggggagagataagagagtggaatcgatttctgcgtaggtagagagtttaatataaagtagaatatggaatccttccatgttctccctcataaaattcacagaaacctcacgacttaccaaagatgccaagaggagcaggagatgctcttgtgtttcacccaaatatttgtttctcattttttttaatgaatgtgtgtattttctagaatgaatataaaggaatgcctcattcgtttatgtatttaaaatacgtcttgactaccaataatgtataacaacctctgctagactcaatgctaggtccagtgcatgcacttggaatccagggacccaacttggaagggctcacagtcttatgttaggagacagataaggaagcatatttatggggcacatgtgagattttgttacatgcatagaatgtgtagtgattaagtcagggtatttgagatgtccactactttgactatctgtcatttctatgtgttacatgctgtgatactgataaagacagggtatgtaaatgtgggagctcaaaggagggacatctaactccaacagtttgccagttgtggggaagaaagggtaaggaagtttcctcaaataattacatctgagcagaattatggcatgccagcaacctcagccaggtgaagggcaaagagaaacatttgcatgagagcctccagggaggtagagaatgcagtgttcaggaactacaacaacaacaacaacaacaaatcaagtattcctgggccacaagatgtgagagggggaatgatgggagatttgctggagggcagggggattcaaataaaagaccagcacacatgagctggtttgtgacctactacatagttttgacttgatccttacaacatagtattttaagttaaagagagagaagttcatatttgcagcggggaggtggataagtggttgttgagacattaaaatagtagagtttactggacttggaagacttagcactggacttggtaacttagtaccttgatttctggcatctcagtgagttgaggccacatgacaagtaggaggaagagcagttattatcaagagaatgcaaatgactgaaatgttgagttggggtttctatgggatatactggtagatagcagagtcagtagtaagatacaaataggtctgagacacaggagagaatctcaaaagggatattaagcttccatctctgtaagagccatatggttgggtagttggtttgctttgtgctatacaactatttgaagttctttacattttctttcctcctgttttttttttttttttttttttgaaacaagatcttgctctgttacccaggctggagtccagtggtgtgatcatagctcactgcagcctcaaactcctaggctcaagcgatcctcccacctcagccaactgagtagctgggactacaggcatgtgccaccatgccccattaattttttatttgtattttttttaaagacaggggtctcacggtgctggccagactggtctcaaactcctggcctcaagttatcctcccacctctacgttttcaaatctaaaaaaatagtttaggacgtattcaccttagagatttaagagtttatattttagcaagctgtaaagtccagaaatcaaattgtgagtgggcaaacaaaatcaaagcaagtttcatctcatttagaaatgtggaagaatgagaacccttagtttaccttgcttttgtgcatgcagagtgctagctgtaatgggttagcacaaaaagacaaaatcctaaatcacagtcactttgccataatttttaatagttatgttctctcatagttctatggatgacatgctcattatagacagtctgaaactgaggagaaccagggttcttcctacatgtttatgttgaatgtggagaaggtgaggttactgcttctgctgcccttttcagctcaacatttgatctggccaatgtggttagctatactgtgtctcctaccaccacacatactcagaaaactgtggtagtaaacatagaatgaacttccttaaaagtagaaaaccattcattggctaaggtacataagaataagaatgaatgatgaaaacattggtagaaatgctgatggaagaactgattgatgcagatctattttggagaccccttaactgccaggggacatgaattgcctggctggttgaattgactctagaaatgatgctctgtggccgctaagtctccatatttgaccaaaaggtgtgtgagggctgtgtccatttcatcacttgccatgagtcctcagggctagtcagaataccaggccgatacacgcttcacaagcatgtattgaatgagtgaatgagaaaatgaatacaataatattttcactagtagccatggattgaggataaaattaataagaagagcccccaggaagtccggattgagctttatgctctgggacactcttctgctcagctttgtggaataatttgcagcactagaaatggacttaacaaccaggatgagggggtcatgttttggggatcaaacctcttttcatcatgaaagctactgggtggcctctgacatgatgtgtttagttatcaaacatgtcagctaataccatggagagaacacatgtattaaaagtgacagacataacaagggtcaaagattaaaggtgaattgcaaagggctttttactgcatctctgttgttataacagtttctagagtaggttgaatacatgagcaaaaagaatgatgaggagtcatggtgagcagaagctctcttctcaggcaaagcaggaatttttttccccacattgagctaaatattctttaaatgctataaatgttactacatatctgtgctgtttgtgggacagcacaaacatatttgaaacattcagcagttctttctcattaacttccatttttctaattttcattggttatattttcctgattacagaagtagtattggctcattatcaaaaataaatgaatgaaaaaatatagacagttaaaatgtgatataatgtaatggcctaaatatgacattgttaactgtacattcctgcagttacaattgaagatggcattttatcccttaatcagatacaaagaactgttagaaaacttcctttttgcccaccactgcattgtatactgtggtatatatggaaattcccaatacagacatggaaatgataaataaacacaaggggaactctcacggcataactctgtgtctagcaggctaagataataccatgttgtgcagtggtggtaattagagcacatcacgtgactctgagtttttgagggcagtggtcaatatctttatctttgtatccccaagggtgttggctaaaatgttcagttagcactttgaatgagggaatgcttattgagtaaaaagtcaattacatgtgacaataaatgcagtaagaattagtcaagagaaagacaagtgtggcctgcagtcaccaacagaagctttaagctccaaggatacccaaatgcgtatgttaatcatgtgttattgttaaagcatttagatgatgatgtttggaagttgtgtgcaaaaccaggaaaaatttgaccaagttttggaagttcctttctgtttgatttatctgctgttatggtgttagggctattgctgttttatagatcagttctacactgtagtaattaactgggtaatgaagacaaaaagtatttagaaacactctgacatatcaagaaattagtgtcaccaacccagaggcttctctgtctcttcagcataatcttccatctcaggtatacctaaacttgggtgtttactgcctcaaaagcaagcatttcccttgaaaagcagatttcttcctttctttttttttttttttttttttttttttttttttttttttttttgagatgagtctcgctctgtcacccaggctggagtgcagtggcacaatcttggctcactgcaacctctgcctcccgggttcaagcaattctcctgcctcaacctcccgagttgctgggtctacaggcatatgccaccatgcctggctaatttttttgtatttttagtagagacggggtttcagtatattggccaggctggtctcaaactcctgacctcaggtgatccgcctgccttggcctcccaaagtgctgggattacagagagaagctccagcttttgcactagctgaatgttgttatacttcctcaaacatttgaggataaagacataatatgtgatagttttaggtgactttttgtgtgtaacatttgagctctgaggataataatatatctttctatataacacatttcaatatctatttaatgtgccagttgcaagaattttctgattgacattgatcattttcattcagaattaagtcatttccttctgggaattaatataatagatttattatatgcttatgggccttgtctaagctctcttctccacactgtttcttcaaatgtaattccattgaaaatctagctgctgttttagagattacagtaaggcaaagcatttctcagaagacaaatatagaacctaaagttactataatgacatttggcaaattatataatctgagttcattttttttctcttctctccctcctcccttgtcacaaagcctataggaaggtatactacatattttgacacttttttttttttttgctttcaatagctgtgttcttactcaccactttaaaataacgtctttcttatatcttttaactcagaggtatactcagagactggaagacttgaacggggactggctacccagatagagcccccttggtggtgttttccttggtgatatgatactgggccgtattccctcaggattgcagggtgagaactgtgtctttgctagcagactaggtaggagaggatccattcctcagaatcaggttcatgttaacatagttcacatattgtattaaatacaaaccagaatgccaagttttttatttacaatgagcaatatagctgttaaataggctatggcactcaagtcaacaacaattcacagactcctctccccatagagaagcaacatggggatccaaattgtaatcagaatgccaagttatcaatttataatgagaaatgcatctgtctgacgagaatgttgagttggcctgataaattcattgtctccctgtagattagtgacaggggatgccaaattttcggaaagttgcgagagaatatggctttaaaacaatgggaaggagttgatcttaatttctgtcttccaattaagatggttttaacattcccacctctacctggctggccttgccgagaaaacaatactgctttagtcaaacaatactgctttagtcgctgtgaccagtgtgggcaataaaatgtttattttctgcctttcctttttctttgcttttctcaaccaactacctctctccaaaaatgtgtatgacataattgattgggcttttgtctgtcatagtattgattcatcgagcctcaatcatatttcagccttccagccctagaattactcccatattattttttactggtgtctgggctatgttcatatgtgccaatcaaacatgtatagtttactgacctaacctcacatttgtttaatcatatcctttatttttaaattctgtaaatcaactcactgcagtccttggcactgaaaatacctctatttcttcactacatttcctgaagtggcaaaaatgccaagattatatgagacccagggggaaatatagtgttctctgcccctagtgtttaatgcaaattgaaactaaaataaggcttgctttgaaaaagtacaaaaataaattttaaaaaatgctaaaagctggattcttctcttttggagatggcaaagagatagtaaagttgataaagagatgatttgggaaatgcaggtactttttagcattagtgagtagactcatttctaacatctcctggaagtatttgtgaattggctccagaatcttttgctatcacctaccctacaattaactagggatatgcaatcaccaaatacagtttctgggacaccttcaaagatgtcagcttcttcaccataaagatggcaaaaagtagaataattacattctatctttgacctttgatgagaaatgatcagtttctttttctaatccaatatggcaagcacttctaattcgtgtgaatagatctctttatagacatagtgtgtttatatttaaatactaagataatctggaattctgaagctacaactgtataatgacattatacttggtcagctattgcttttcttttcccatttatttattttgcattgagtcctacactggtgaaaggcctggtgcgttgcattgagttctgcatgtttgaacttcacaaaggttcaaaggtgtgcacatggcctggaacgataaacatttgtcctaaagtcattcttcagcttctgacatagcttgtgatttaattgccacctcattaatatgggccactgggtgtgaatttgtcaaaacaagatacatcaggagagctgagtgaaatgtttcatgttcagaggtttttaccactcctgttccccactgcccatgttttgtaaacttttaacttcaagagactggtttaataaacatgccctgtcttctaggtcattgggttaaggatcatttcagtctttttgaacttttcacttttcctgtgtaagtataagctaagtacttattgggttctaaagctaaaagcctatgaagataaagggccttattgaaatagtgaagtgagcaaaatatctttatggttcctgaccttgtcctcctgggctttgtccttcttttaatgaatgacaccttaccctcaggttcccagtatttacacctttgtagtgtttttgcaattcagaaaaatgtatttgatagatgagtagggtgactgtcgtttacaataatctattttctatctcaaaatagctaaaagagaatagtttgaatgtttctagcattaacaaaagacaaacatttaaggtgatacatattccaattataccgacttgatctttacaagttatacaaatgtattaattcaccacgtgtagcccaaaaatatgtacaactattaagtatcaatttaaatttttttaaaaggacacagtgaaggaccatacttaaacttgattatttaattgctcatcatgaaattttatagggaaagaagaagaaaatcttcaataactcaaactcataagtaaagggacatacatggctgtatataaaggctatttataaagccctctatataaaagttatacatagcctataaaataaataaggatctgactttatattggtacctggcacaacacatgcattgcacacaggaaccactccataattacaattaaaattattatacacacaaatacatatttacttcttatcaaggtatcacatgttaatgctcacatgaagcagtatcaaaataccgccaatgagttgtagaagtctcttgctctattttcctcagtggcattctcactccctagtgaagtgtttttaattatttttatttttttatttttttactggctattttagactttctggtagagcactcaataatttctggatctgtcagagttaggcaatccactctgcaattggcaagatggggattttgctcatttatacttgactctccttcttctattaatcttctccttctatttatataactgtaacatagctgcaagctttaagtaaaacacgtaaagtcattttcttgttctgatgacttgcaatattttctctttattccccacgagatgaaatgaggatcttggtcccatacgctttccccaacttcttctcactcatttcaggccctacttctgtcaatcactctttctgtgtttagattgttgatatttgcacgttctgctaaaaatacaatcatctttgcccaaaggttaactttaaaagtagaacaataaacagtattaacattattatggccacataaaaatcatttaatgttaggtaaaaagtatgttaggattacatttttttaagagaccaatgtcatgacctctaactcactgaaaagaaaagattcctagcatttgagttcaaataaatgtttttttccttatatttagtcaattgcttaaaattaagctgcatttcttttatgtattctattttcctgcatcatatcttcatatatatttttttactctctatcatattatctagtctatttggtctgctttcccccactccaaatatatcccccttctagagtcgtctttctccctactccacactggacttacaactcctagacatcgtgctgcatcgctaatgtcctaagtttggtgttattggtgctatcaatcttcttggttagatctgatattttggtagcttcctattttttgaattatcctcttgttttattataatacatcctaaagtaacttcctaagagaaagcacacaggaggtaaatgttctgtttcttgcatactctcatatttgtgtgaccctttggccgacgatagaattctaggttgaaaagagttttcctttcgaaatttgaaagctctgctccattgttgttgatgagaagtcaagtactagttttattcctcctgtttccctttaaaaacttttaggagcatctcattattttaggtatttacatgttttcgatgacatacttgagaatcctttttgcacttattacaatatacactcaaggaaacttcttggtttatagattaatgtcttccattgagctatgggaaactttatttctatcttttctttaatatgttctcgcctccattttctctcttctctttctctgacttttaatatctggatgttagatcttccagacttatcctttctcatgacttctgtctttatactttagtcaaattagtgagagtccctttactgtgtttactccctctacttttctattttgtttattccaacaactgtgtttttagtttctaagtagtctttcttgctctctattttaattgtccttaccttctgtttttattttttggttataatagtttctccaatttgtgtaagtttattagagtatcttttgtctttgttcatttatttcttacactattcctgttttcatcttgcctgtcttagtctttatccataatattgccagatctcctaatatatttattattcttgctggtctatttgtatttaagggaaacaaaaatggcagactgcttttttttttatctaatagaactatttacacttaaaatctttatccttagtgagaactgtgggaatagaggaaacagagggaggggcaggtgatccaatatattaaagaggtgaaatttggcatcaatgagcctccaccataaaagaatgtgaaaattgctattcccagatgccaacatctaactaaagccttgcttttctactgggaattagttcaatttttttagagaagaacaaacaataatttttgttttgctttgttttggtttttggtttggggggttgcatgattattattttcttggatgattattattatttgcttgtaattgttcctgctgtttgtttcccaatatctcaaacggagatatttggctgcacaggagaacaacatatgtagctgtttcatacatggagcttacattgggttttgttttcagtcatatcttttatttctacccttggactccctgaagtttttgttattctttttatttctgccaaatctcccaccaatttcgtagtcaccttatagcatattttagactctggttttctgcctgttacgttttaaaatggagcagtaaacacaattatgaccacataactaagttaaaattgagtcaaaaagtgtgctaagattaggttttagatttttttttactttcagggaccaatgttgtgaacttcccatcacctatcttcatcttcatcccaaaatagcacaccctttcttggttattatgtacttcttttgtgttctgctaaactattatatactatacttatgctttcaaaataattcatttatatataattaagttttgtgtaaatatttaacatataaatatttagtagaatctctgaaaggagtgaaggcaaaaactttcctgacccataataattacatacctagagcatcacaaaatctattatcaatgaatggattctgaattctttgataacatgtctttaatttttaggatttaaagtacctcctttaaagcaccagaccagtagtcaattattatgatactcacctctgatattgtcttatccctgagtgtgtaataaacttctggtccctggaatttctcttccctcataaaactgtttctcaatgtatcattttgtgatgacttttttttctgagcttcctttacctacccaataggtacacattttttcccaagatgctacaacaataccagacaattccagatattcccgccttccacttgtgatctgtaaaatatatatactggttggttatgtgcaatgttttatgccctatgccctttcactggtgatgttttaaagcaagcattgtagatgaccatgaattatagcagacaggttcccagtcctatgctgtttcctaatgtacattttttctcttgtcacaactaggaaagtcacgtttcagtgttttggttttggtgaatgcccacaacaaggctagtgaaggaaggaggcatagtaggaagctgttggccagacgagcttttagaagacccttgctacatagagaggacgtagaaaatgtctttatcattaggtgagaaacatgaactgcattctttgttgcgtcatattaaaatgtaaatcacaagaataaattataaaaataaaacctaaccaaaacacaaacaggaggaggtaacagaggacagaacagagttcctagaaaattatattacaggacagacatacaagtacccaagagaaagcaaaattctaaaagtctcttagccaagtgtagagcacaaaagttctcctcagttcatgcactttcgaggcatgtcagttggaaaaagagcatgctataggagacagttttattgtgttttgtgcagtgaccttttaaaagggaaaggtcctttctgagatattttgagttcactcatgcatctgtcatagaatttgcttggaacgaagtgtgcctgtcaccccaacctttcttcagagcagagcctggcttcctcatgggaagaatgatgttttaagagtgtcattcagatggaacagaaagaggtcttctccaggtttgtcttgctactgaatcaataggatctcctggattttgaaaagtatattaaattttttttcagacgtcagagttggggggaactagttttgtttagctttatacaaatttctagcattacttgtacggatatgctggagattctgctgcctcttgcaatctgacagcctcatggagagttgaataaatggtcattgcctgggtaagtgagggctctttctaaagtgttcaagagtaggtcacatagagaggagtgccttcttcctgcattttttcaagtacctgttttcccctattttattcttttggaagggattgattttatggtagtccctttcttttctcacctcttgacagaatgtttttctaaatgattccttcagattattctttaggtcccattaaaagaaacatgctggttcttcattctcattctgtctttatgcttaatgcagatataattcatatttgttttatcaaagtcatttgataacctcttcaatgacaaatccctgattacagatgtattctcttttggtaacccacaggggttgaaattgctctaatttttggtactgtgtattaggttgagattaaaaaaaactttgaggacaatcttttccttatttaatatctggagaaaaaatactacatgtgagaaaggtggaaaaaggatgttgcactgtatgtaataaaagctatgaattttggcacttttgtaaactgtaaagatgtaaatgttccttaattattttcagtagtcagacttatgtttcttccagttgtatttccaggctgagacaatacaaaagatggacagctctaagttgattatcaagctttaaatatgtttcacttgattaagaacattgaaggtgagaatggaattatgtaggcttcactgagtatccgtaaagttgggaacaatgatatacaacacagaaaagaagctccataagaaaacagctgcaactaacccatctggaaagagacctcaatcaaaatgatacttagcgaaagaaaaatactttcagtgatcaaattatttgtctgaccaatgcttggtggaaagattccacattactagttatttgtaatgggtaattgcacaatatactgtattgttcaatctggtgtgaatgaaagtggggagatcttgacaattgtcttggaacaatagatgtaaaattgagactattctgggaaaaccaggatgtttgggccccctggtaatagtctaatcattatacatctgtgctataagcacacaaataacatctagtaatgaaagaaacattcagctaagaaaacttgcagtcaaaaacttttgataaagctgtgaagacttgttaggtcatgtattaatttaagatctttaagatggagagcatcccatcaatgattaggagaaacacaaacattttatattgtgtttaatacacttttttatgtttaataaaaaacatatcacctaccctacaactcataattaacttatataaagttttttttgtttaataaacatttcatattgtgtttaataaaacgcaaacattttattacttacaggtcctgggtgggggcagtacgtggcatgcctggagatgacacacaaggagatcaggaagtgtgggcagggagaatgtggacctgggtcacttgtatttattggagtccagggtgagaaacctaagtgtcatgggacgaggggagcaattgggcagtttaaaacaagcaggcacaaaatttcaaacaacccaacattaaaaaccctttctggcaaagaaatgttatctagaaatctagctgacccaaaggctgagtgtgtgggtttggggtaagagctatcttgcctcaccagagcaacaaaaaggagaagtcatcggctaagctagatagccaaacaaaatggatgctgaggcaacattaaattataagaattataaggtcaagatgggatggagattctggacctggtacaaggaagtgctgcaatgaatagcagggagttagggcagactacttccagtgtcctgagttttcaggtttcatttggctgtcaaaaccatttgttccctagactgtgatttgactggtgatgctggctggcagtgcccctactgatgacttagcagatgactctgagctgacaatttgccatccttcagctgtcttggtaggagggattcagttaccagcatgcacagcacagagcagaatccaacctcatagattttcaaaaacttatcgctaaagtctattattaacagcttggtaagaaaagtctttttcattgagaaatgtatagattattgtgaaggaaaagtatttgctaagaccagactggccgaagctaatccttttgggaatagccttaccaatttgggggaaatgactcatttacttataagctatacctgtcagcttccctttactacctttgacagctcttaaaccagcagtataagaactgctagtgaaaaaataaacattagtataaaactttatgtacctattacataacagtcatatattaggtgtccattttaagtacagatactgaaatagcaaaataatttattggagaaactcaaaatgctatagaaaaatttgacttggaaagcaccacaaatgtacatgatacaagtaaacttgaagaaaccaattacattgggggatagtcttgttttctgttattctgtggacttgctttattaatatatggaatttagagtttcttatatttaaaaaatatgaaaatgcacataatcattcccaggctgctcctgatcctttagtgatgattcctacagaaaaaaaaaaagtgcttgggatggggaagaactttgtggccatcgattttttctttctttctttattatttttatttttttattatactttaagttttagggtacatgtgcacaacgtgcaggtttgttacatatgtatacatgtgccatgttggtgtgctgcacccattaactcatcatttaacattaggtatatctcctaatgctatcccttccccctcccaccaccccacaacaggccccagtgtgtgatgttccgcttcccgtgtccatgtgttctcattgttcaattcccacctatgagtgagaacatgtggtgtttggttttttgtccttgtgatagtttgctgagaatgatggtttccagcttcatccatatccctacaaaggacatggctgcatagtattccatggtgtatatatgccacattttcttaatccagtctatcattgttggacatttggcttggttccaagtctttgctattgtgaatagtgccactataaacatacctgtgcatgggtctttatagcagcatgatttataatcctttgggtatatacccagtaatgggattgctgggtcaaatggtatttctagttctagatccctgaggaatcgccaccctgacttccacaatggttgaactagtttacagtcccaccaacagtgcaaaagtgttcctatttctccacatcctctctggcacctgttgtttactgactttttaatgatcaccattctaattggtgtgagacggtatctcattgtggttttgatttgcatttctctgatggccagtgatgatgagcattttttcatgtttcttttggccgcataaatgtcttcttttgagaagtgtctgttcctatcctttgcccactttttgatggggttgtttgtttttttcttgtaaatttgtttgagttcattgtagattctggatattatccctttgtcagatgaatagattgcaaaaattttctcccattctgtaggttgcctgttcattctgatggtagtttcttttgctgtgcagaagctctttagtttaattagatcccatttgtcaattttggcctttgttgccattgcttctggtgttttagacatgaagtccttgtccatgcctatgtcctgaatggtattgcctaggttttcttctagggttttaatggttttaggtctaacatttaagtctttaatccatgttgaattaatttttgtataagatgtaaggaagggatccagtttcagctttttacatatggctagccagttttcccagcaccatttattaaatagggaatcctttccccattttcttgtttttctcaggtttgtcaaagatcagatagttgtagatatgcagcattatttctgagggctctgttctgttccattggtctatatctctgttttggtaccagtaccatgctgttttggttactgtagccttgtagtatagtttgaagtcaggtagcatgatgcctccagctttgttcttctggcttagtgttgacttggcaatgaggactcttttttggttccataggaactttaaagtagttttttccaattctatgaagaaaggcattggtagcttgatggggatggcattgaatctgtaaattaccttgggcagtatggccattttcatgatattgattcttcctatccatgagcatggaatgttcttccatttgtttgtatcctcttttatttcgttgagcagtggtttgtagttctccttgaagaggtccttcacatcccttgtaagttggattcctaggtattttattctctttgaagcaattgtgaatgggagttcactcatgatttggctctctgtttgtctgttatgggtggataagaatgcttgtgatttttgctcatcgattttgtatcctgagactttgctgaagttgcctattagcttaaggagagtttgggctgagacgatggggttttctaaatatacaatcatatcatctccaaacagggacaatttgacttcctcttttcctaattgaataccctttatttccttctcctgtctgattgccctggccagaacttccaacactatgttgaataggagtggtgagagagggcatccctgtcttgtgccagttttcaaagggaatgcttccagtttttgcccattcagtatgatattggccgtggatttgtcatagacagcgcttattattttgaggtacgtcccatcaatacctaatttattgagagtttttagcatgaagcgttgttgaagtttgtcaaaggccttttctgcatctactgagataatcatgtggtttttgtctttggttctgtttatatgctggattacatttattgatttttgtatgttgaaccagccttgcatcccagggatgaagcccacttgatcacggtggataagctttttgatgtgctactggatttggtttgccagtattttatggccgtcaatttttgaccctgagagtgaacctcacctttggaagttactaccaagcatttgacttttggaagactctttacacagcaagagatctcctccacctttgaggtgaggacattaaacttggtttaaaaaattacttttccaagtacattaactatgtcttatatattatccatacacgattactaagaaaatataaacattttttcatatactggttaattggctttaaagaaaaaaatcccctttttaatcccatcaggatttagtttgacaaatttttcagaaacttataaagatgaaaacacctggatgtatttctctgtaaactttggctgttagcatcctttttcaatgcttgtgtagtttttcagaacagaacctaaccttcaagatgagtcatttgttcccaaacttgaattgtcatgaaacactccttgggtttccctcccgtgctgaatatgatttctaagaatgggatggcatggttactgtataaagatcatttgttctacaggtcagaaggcctgagttctcatcattaattaactttgtgatgtatgttgggtaaatcacttaacctctacagttttatcttctgtaaaatatgaaagaaagactttgagctaaagtttgtttctactgtaagaacatgagatattttatcttggtgacatcatggcttatgggcaggctgaggtgggattagtaattgcaaaagcagtggtcataaggtgaagaaacctggacatgacttcagacttaacctgggaaataaaatcagggaatgtggacaaagtcagacactactttagcacaggatgagatgccagaagatgatggatccaacaaagacatgcatgaaaggccacggggctgtttctgggcttaaacaagctagtcttaattaggagaaaaagcggagggactggaggagtggaggagaggaagtcaatagtgatgcagtacttccatcctagagggtttcttcgagagccaagagttccaatctgtgcatggcattaccccttctgaggtaaaagaaaaagtcctctacaaaaacctgacagtattctgccctcaagccccttgttaaccaggccaaggtgaggcatgggtttcatgccctactgatagcagtgcaagatgtcttgttatgagtattgatatcgaagtatgcttttaaatcatatttcactctgacaccgttagctacgtaactaagtcttagtgctattgccagtggtccaatctaaatgatgtagtagagaatctagttcattactctgagctgggactctgatgaagatgtagggtgacacactgtctttgtgaagaaggcatgtgtggaatacttggtgtctttggtgagatggcagaacttaaaccgtgaggaggatggcaatcatgaggaatggtatcaggaagtttttccagcttgatagatgggaaggaaagcagaatggcaggaagggggccaggtgctatctccttgaaggagggatgaaccgtcctcagggtctgtctgctcacaggcaggagacttataccagaactgtgtttactggaagtcttttagagttcaaagtgaacttatctgagtttgacaaataatcccctacagcaagacaaagagtagtagatgaattatacatttggatactgttggaaagggagaggtaaaatccaagttggaataaagcatatgttatgggagatcatcaatatcattgagcacgggctttgaggattagagttatgatgaagtataatagtacagaatcagcttgagacacagtcttatgtttgttttggtcatctgcctagaagtaaggtgcagaaaatgcttatactttgaaaagtcgtgaattaaatagaactttctagcaatggttgatgaactgggtgggtgtcaaaaatcaagacttcatgattgggaagctgtggggatggggaattttcttagaaaagagagagactctaaatggtgctagtggggtggcctaagccctgacagtggaatgggacctttttggaagactgcacctcggggtaaggatgcttgtgaccctgagactagcatcaacccatgatagaacccaagggtgcagaaacctatgatagaaagcaagggtaccaaaaccttgagggtgttggcagactgaggggcactcagttcacccagggacatccttcacctgagaatgacttttctagatctccctgcagtggttttgagaacctgagtcctagttgagccttctgtgatgccttccaagtcctagcagtgtggcgtgcccacacatctttctcaacaaaggatgcagaaataggaatgtaattagagcagttcatcctcggtagagagtcctttgtggttcccagctgggcagtagtttaaaggatagccctgtgaatctactcaaatagtatctttatttaagatgtcaataaaaggtagtaaacttgagaatctctgagaagcattgatccatagtggaaattacatgtatttaagtatgaaggtagtaaatatatattaacaacacattatatgccagatactgtcctgggtatgagctatagctggaagtcagagcggtacaaaatctaccatgggggagtttaagaccaagttttcaagccaaacggaactggattctactaatttccagactgatgccttggagaggttacttgaatttttctgaatgtccattttctcatatattaaatgaccattataaccttgctctgtaagactgcttgttagatgatataatatctttcaaatatctgttaaagtgcctaataatagcataatagctactcaataagtagccataattgttttaacaaatgaaatttagactcctaggaaaattagaaagtactgcactggctttcctgttttcctaatggccatgattatttatccagtgactcagtgcagattttgatttattttccttttcatagccaccttatcaaaaagtcctgctactgttatttctacttcaaaatgcatctcaaatctattcacctctctctgttcccatctgtatcaccctagtccaagctctcttactccctagagcaatagccggtaaccatgtgcttacaacacattctctgcaaaggcagcagagtgtattttttacagcatatatcagaccataagggcctcttgcttataaaggaccagtggatttttattgcatttactatccaaatctgaagttgccatcataaccagacttctctcattctcttccatgtcttctggtatcacattcctgcactaacctctacaccctgcgtcctcccacctcacctcagcttcaccgtgttctcagtttccagcacgcaccaagctctgtgccacttcgaggcctcacacctgccgatctctctgcctatgattctcttctctatgctctttgctgaaccacctccttcttatccttctgccctcagccttacctcaaccagcccatcattctctcagcctccaccgtagcacttctcatgactggtgcttgcttatttacatgttttctcttgcgcattggccaccacaaaggtaaattcttatctgttgtgtgttcaccttggaatttcccatccttaactcgataggaggctcttattaaatatctttgtaaataaatgatatttttatgatagataattgcagattacatgattgttcagttgttaactctgtgcagtcgtagagtattctggttttaaagattagcacttggtttatatgtgaatgaactttcaaaattagacacgatcttctcagttttcttgtcaaagactgtttctaaagatttgcatgagctagtctggtcctggctatcttcctatcagggatgcattcctgtattggtagattctgtagattaactttctaaatcattcatggcccttccttctgcgccgttaactaggaagtataaagtactttagaacatttcattattagtattcccaatatgaccgtggaaatgtgggcagtgggatgaggcaatcaaactgaggttttctttcatgataactatttttgaaaactacctgcagtgagaaagaattctcaagcaggtgcagtggtgtttgagagaagcataaatggagtggttgagcccagaccttggagtcaaataaacctaggtttgcatctcagctctgttgcttacaagctatgtatttaaactctctgatctccaaagtggttttggtgattcaattagatcattcatacaatgagagtcttaacaaatggtaagcatttttaacttttagaaaaacacaaggcagttagtagacgaagtgtatgaggacattgctagcttaatataaggttctttaagggtaaaataaagagaaagggaagaaaggcagagttctttcttttttaacttcttaaaccttttcttatgaaaagatatgccacataaccataattcatcctggcaattaggtaaacagtatacagaatatgactctcgccattaaataaacttaagcaaggtatctttatcctgaaggaattcttagagatttcatcatgagtaagcacttttcagtatagaattgccaaaatacaaaagaacaccagagaaccactctaacttctaaaaaaaawaagaaacccaaaaccttgtgattgaaaaaaaaaaaaaaagtaagaaaaagaggcccttagtcattctgttcccttttgggcctctatctttcatttcctctggggaaataaagttataaactgtgctggcagtaatctagggtgatgccaagtcagttacccacccccaactccatgtctccaaaagattctttaccaccctttgactctaattaaagaaaacaaatgtttccagttttctrtcatgtacctttccactctgaattatagaatagctttcttgaaattcttttaattgttttttacaaaggattagcattaaattcatagataaaaataaattagtaatagtgatcaaaatgacctaactccactttgtttttacttttcttctgggtaggagggcaaataacataactgcttatatggtgatttattttaaattgaatctgaatttctatttcttaaggcctcattggcttcatggcaaataagagagttttaaagaatttattgtgttaatttctgaraaaccaggagtttactgttgacaataatggcacaaattacaactcctacacagctctaccccctccacttttgagtttcaagacttttgccaaagttttctggtctttgttcacttctattattaacatctcttgtgtgaaggggaattttgaatgaatgggatgaaatcatctaaaccagcttcggtcctaaatatagtgtctggcatcaggtctgggaaaaaaaaaattggtcaaagagatagcctgaggttatttttaggaagttggatgtttagggaaattratactatgaaagttctggcctctatctctgaagatattccattgagagatacatgcatgcattcaacatctcgtttttttccattcctgcccttygggtgttccgcgtcattcactatcttgtcattacagcattaagcagaagcttgaggcagaagatagctaatgcaacgtttccatttggtcctgtaatttttctgcacagagctttataggatttcatttcgggttaataaggggaagttggaaccgaggagaaagcttatgctctgccaacatatactgaggattactaaacttggaggtagaaaatagaacacaggaataaaaatggaaaagtcctggcagatttctccgtagcagacttcatccttaaaaagcagaattccatccagctcttcttggtggcataattccttatcatggaattataagataaatgctctgtttttatgcgtctctcttttctaaagttgaattgagtgtctgaaagacagatgatgtgtctaataccaccgttgttttacagaagggaaatctaagaaaactatagctaccctcctgggaaaacatatctaggcatttgctaacagtcatttaggctgcatctatgcacttccacacagaaggataaatgtcacatgttcgttgaatgatccagatgtttcaaatatacagttgttttatatttggtaaacaatgcagttaggtcatgtaaattttaatttttcatttggagtttatccctatgcaggcaatcatagattagaaagttatttttttcatgtcctacctctttgaattgtcaggttcttttaaatgctgttatgyagcaataaataatattttatccataatcaaggtggatgacttactggatatcagatattattattaacaaaaagtttactacattgtacaartatcactagacaaagacaacctctagaaagttaattaaggtaactaaggttctcaactgcaaccacaaaactttcacagttaataataatttcacagttattaacataactttttsaagaggtactatactaaaccaaggatgctaaatataacttattaatttctgtgatggcttctggggatatcaatattggtatactttcctcactgcaatgaagacacttctgcatctacttttgagatttttttggtcatctttctagcagccagctgtcacctcttgctgctgtaacagttcctagtaatagttcccttattcttcaaacctgatgttagcagggaggtcagatactcaagcatgattagaattgtagaagcttgagcctcatatttaaatgtgtgtaaatatatgtttgaaaaagaattaatgagctcttaattgcagatcaaaggatatggtttgatagtgaagtggcccaatgaaagttgtttgaattttccttttgtctttctgtaaatggaactgtgttcttgaaagcctctacgtctttatcttgttcctcaagattcttagggcagtgcgtgtgggtcaggggtaggtrtgtctgggaattaagagtatctagttgatttagtagctatatttctcttctttagcctgtttattgggaaatgaaagacaatttaggctatttcattttcagtcagtgtctgttatgaattcattggaaayagcaatgtgaaaagaggaatgaatattgtagatttctttcattgtcatatttgtaaattactgggtgggatttataaacaaattattgactaattatgaacaaactgttgtttttttcttttcaatcaatatgaacaatcaagtgacctaacamatttaattttaaaaatagatttgaaaggtatatagtagttaaaacaaggccccttgattcagattgcctgagttcatatctcaaataggctacttttttgtggtgtgcctttaggcaggatgcctcagtttcctcatatgtaaaaaagaaatgttaatagcagcttaccttgtggggttgttgtgagtgggtcaaatgacctactatgtgtaacgcactagagcagtgcttggctggagtaagctccatgtaaatgttagtccttgaatgaaagtagagctctggtagagatattccataaagacaaccttaaacatttttgaaccttttatgcctccaaaatatacacttccaaactcttctatcactgaccatattacttataccctaacaaggaagttattaagaatcataccagagtacaggaataaatcatgccagtcaggaaaaggggtacattggttattctatttataacattacttgagtatttataacaacaagtaaacaaaacgttttttagaaaaagaagagattactgtgttgtacaaatattactagatgggtaatttctctcctttttttccaatgtattccagaacccccatggatatcaaaattaaatgctsaaatcccttacataaaatggcatagtatctgtatactttaagcagattacttataatacctaatataatgtgaatgctatgtaaatagttgccatactgcatttttaaaattaatattattttttaatattttaacctttttttttttttttttttttttttttttttttttttttgagasggagtctygctctgtcacccaggctggagtgcattggtgcaatctcagctcactgcaacctccacctcccaggttcaagcaattctacctgcctcagcccccaagtagctgggattgcaggcacaggccaccacacccacctaatttttgtgttcatagtagagacggggtttcgccgtcttggccaggctggtctcaaactcttgacctcaagtgatccgcccaccttggcctcccagagtgctgggattacaggcatgaaccaccgcgctcggccacatgtttttaacttttatttttccaatatttttgatctatgattggttgaatttgtggaagccaaacccacagacatggagagccagctgtgtattgttattgtcatgtcttttattctcccctgttcttttctgcctaaatgccttaggtacttctttacagagttagatagcatttaccattgataccacccagagtggtgtggtttgcttctyctgaccctttcatgagcaaagctggtttcaggggaaactcagggatctgaacwgttagtaacactgattagaaatgcagcagttttattcaggccttggttttattgaccatttttggttggctcttatctctgtgactgatcatgtatgcgtatttcaaatggataaataaactaaaaagtgtttaatactccaaaatgattagaagtgtattgttaaataccaaaaagaaaataattctggggtgtttcagcatgttattctgttarcrtagttcacgttgagtgtttgtattcatttgttgtttgtttgtttgtaagtaacaggttttgactaaaattccacggactgtggaacarcacacactggggtctatcggagggtggaaagtgggtggagggagtgggtcaggaaaaataactaatgtatactaggcttaatacctgggtgataagatagtctttacaacaaacccccatgacacaagtttacctatataacaaacctgccattgtacacctgaacttaagtaaaaaaaaaaaaaattaagtcatgtagatgcgtactttgaggtacaaccacgtgaatgattgtgccaaattattatgacagaaaagtctattgttgatttagaaaaagaattaacactgggcatcatttgaataatgggctttataaagaactgcacatattggttactggtagtaaaattcacagaatgttagatataaaaagtcctaaagggtacaaggaaaacttggtttgtcctaggtcaactagtaagattaatctacaacccaggcttctgactctatttcaacattcttctcataatgtcattgaggttacacttaataaacaacgttaaacactctctcttttaaaaaaaattgttggctatacatgttggctcacgcctgtaatcccagcactttgggaggctgaggcaggtggatcaccagagttcaggagttygagaccagcctggccaacatggtgaaaccccgtctctactaaaactacaaaaattagctgggcatggttgcaagtgcctataatcccagctacttgggatactgaggcaggagaatcgctggaacccgggaggcagaggttgcagtgagctgaaatcgcacattgcmctccagcctgggcgacaagagcaaaacttcatcccctcccccccaaaaaattgttaactactacaagcataaatatgaatatctacttacctgcatttctgaagctagaccataagtattaacagtgcttatatctacagtccctggcagatagtcggtgtaagaaatatagattaattgaatgaatcatatgatcatggttaagkttcttcttttgtgcgttttagcatttttaaatttttacattgatcatgtattgcttttgaaattttaaaaaacctggcaaaatrtaattacgatagaaactgacatcaaaaagctttgtagctgaaatagtgtaattttacactgagtttgaaacttctgatatcaggaactttgatgagcctaatacaggtgctatacgggatgaagtgaatatgcttagaatttttgatgaaaacaaatctgactaytcaggtttctctatgagaagggtaggcagtttgatttgtaattatgggaagctgaatgtgaggcttggatgaggctttgtcagtatcagaccagctccttcctattgggggctgaattcccttgggctctccatcagagagaccaacaggaagcaatcatgtagttcttccaacacactcagaagtcagtaggtccactccacaaataaattgtaattggccatatagtaaaatatttggtagtgttattcttgtccttttccatatgtacaagagagaaaaataaaacaacttcacatcctcctaagcaagtgatcgagtttagatatttgtcccctccaaatctcatgttgaaatgcgacctcctcatgttggaggtggggcctcactggaggtgattgggtcataggttccctcccagtggtaatgagtgagttcttactctgttagttcatgcaagaattgatggtttaaaagagtctggtgattctctcccctctctcctgcctgtgctctcaccatgtgacatgtctattcctccttcaccttccagcatgattgcaagcttcctgagttcctgaccagaagcagatgctggcaccacrctttgtgtatagcctttagaaccatgagccaaatcaaccacttttctttatgaattattcagtcccaggtattcctttatagcaacacaaaacaggcaaataccggagcaacagatcagaataaataacgctgagaggacctgacctgatttgctrtaggtattgttctagggtagcccctggtatccattgaagactctgaccgtgagctctgcctgcattaatataactggaccaaaggaaacagaactttagttttatgaatgggtgtctctccaaacaatttttcctggctgagctttgttcattaacatttttcaatttctaaagaacaaataatctccatttctctttttatgtccggcccactctcctgatagatataacctccctcctgtttagttccatgaattgtactccagctgcccaaacctgagaaaaggaattaatgactcattctctctgttgagtgagggcttattccagctggctcgcgctattctgtgtgtatggattctgtcagcagggttgaaataagatgttaactggcagttattcattaatttacagcaagaacaatgacttgactctatgtcaaccatttctgaaacattttgactaacatttttcctgttgcttagaackgaacttaaaagctgggacaggcatatggaaagaagcaaggatccccagttatgctgattggaactaggactaatggttttaacacagaatgtttatgcatgtagaatgaaatacacacacacacacacacacacacacacacacatacacgcacatacaaggggtcatactttatgtttgcattttcctctaaaagtatccctaagagtatttgtggttagtactacatttttttcatcatagtttgtttaaaagataaagcagatattataattattttctttacaggtgggaatgagttaaacaataattaactgaacaaaagcaatgtccaggtactgcaaaactttacataaattactcctattcattttcacagcaaccctctgaagtaaatggtattatcccaacttacagatgtggaaactartactaattaacttacctagaatcgaggtggcagagccaagacacgaattcaagtttctcttcctcaaatttaacattctttcttgtacaaatgtaaatgttctttaaaaatgaatacataatggcaggattcatatcaattttctgccagaattaccatgtttacctgaagtaaaatatgctcataaacaaagcagaaagtgcagctggtgcttacatctaggatgattaactggcatgtacagaatttttttttccttcaattgcaaagtgaatgcagtaaaattacagggcaatgggtttcttcccacacaagacaaggtgatctgaatgatatagaagagaaatgccacatgtggaaataatatatcaaggatttattaygtgtctgtggtcattcttaaggtcatttttgatgtctacacatttcagcatttgagaagttgtatattacatgcatacaaacccatattcaaatatacaattggctaaacaagtatttgttttaataaagtagtartaataaaatatttatagcaaaggrgacaagactcaggactgagaggaaaaactcaattaaaaaaaagacaacaatacttaaatctcttgatgcatctacttagcaatgtctacaatagcttttttaacactatcagaatatagagcataaattataatgtttatcctgcttttaaaggaaaatttttctcttatgcaatcatggtgggagaaaagaattcttaacgtgattatttgtctcatattttattttaggattctgttagtgtttttaggattctatcaatgcaaggtgtaagaacatgtcctggcagttgaaggaaagrctaaggaaaaagatgaaagagaagtgtcgcatcccttaccctccttttaaagaaatgctgaagttgctgagcagaargtgccacagtcatgtcccttaatttatccctcaaccttttccagaagtaaagtgactacacctaagctcagacagtgacagtcgtgggagaaaagctttatagraacagtgataggaataaaagtgtgtgcactgggatagatgtattttttaattacagaagtaactactaatctatataagagaggctccttccactctcagagcttccaacttaaccatctgtgaagagtaggtccttcaaaaccaactgtagcggcaaagttctgagrtgatatttccagactcagcagataggaacaggcatgctaggtgagatatggcagggaatattagtcagggttctccagagggacagaaccaatttgtgtgtgtgcgtgtgtgtgtgtgtgtgtgtgtgtgtgtgtgtgtgtgtgtgtgtgacagagacagacagaaagagagtgctttagtttaaggaattggctcacaattatggagactggcaaatctaaaatcttcaggctgggttggcagtctagagactcaggaaaagctgatgttgcagtttaagttcataagatttctgttgtcagaattctctcttgtttggggagaggtcagtcttttgttctattcagatcttcaaccgattgaatcagccccactcaccttatggaggacaatttgcttgactcgaagttcattgatttaaatgtaaatcttgtctgaaaacaccctcctagaaatattcagaataacgtttgacaaaatatccagggaccagggaccatggcccagccaagttgacacaytgaactgaccattacaagtctagttggcacccatatacatctccttaagccattcttaatctccaaatgtggtcacattctgaggaactggtggttasagcttcaacatatgcattttgaggagatacagtgtagtccacatcatggaggtagccctagaatttttttgtttccattcctattggcagagacaattgaggaaaagggaaagttccctttcatttattttactctcctgcacatctaatctttaaggagagaatagaatgagagttggggcacaaaacaaggattgaagggcagctgacttgagtccacgtagccccagaacaaagcaaaggracattagattagtggggtagtagagattaaagaagtaaacagaattgaaactggcagaagatagggtcattgtagagtggaaaaacatatctgaaacatggttgttaagtcataagctaatatttggaaagacagactccacttacttttttccaatagatatatatttactaaaatcttgggaaagctaagcttatgatcaggtgtaaccaggccatatcccttgggtcccaaagtcaataagcagggagagcttggtgtttaagtccttaggaatgggtcatgccactcagaaaagagaagagatgtttcgatctgtggattgttatcatctgcaacccaggaggctctttgattcttcatatcacgttatttttacctgaggattgtagataccctacagtcttaaagcctctggccaatctgccttggaaccacaggatacattaggcaaggtctggggctggctttgacaaaggacacagtattgctggcagaagaaatcactcttaaagggaatatagatgctactgtgagagactgatcaactaattaagatcttgttgaagattctcaaattgagtttgagcttgttgacaaaaaccaggcttaggcagagggatgatgatcctgagagcatcctatctccatcaataggagtatgttttcaacctagtggtttttttttttaatttttattttaggttccagggtacatatgcagatttgttatataggtaaactaatgtcataggggtttgtaatacaggttacttcatcacccagggattaagcctgttacccaataggtattttttctgatcctctccctcctcctaccctccaccctccaccctcaagtaggccccagtgtctctttttcacctctaygtgtccatgagttttcatcctttagctcccgcttattagtgagaacatgtagtatttggttttctgttcatgtgtcagtttgctaaggatgttggcctccattcttgccatgaaaaacaacaggaaaataaagcactacccttgagcatgcctctagaacttgaggttcaagaacaacagaagagtggcagaaaactatatcttaaatatattctttatcttttgtcagtcctcaatctggcaagaacattgctgctacctgacctcatagacatgcatttgaactcctacttttagtatctgctctaagatctgatttaagaacagatagtagaatagaataagcttggttctctaggtatcaattttcccaaatttcacagtagttctatgtacagtcacattgtatattataaaatatatgtttaactgtcacatgcaagtatatttcagtttttaaaagctcaaggtgcatgctgatagtcactataaataaataaatacatatgtcaacatctccctatccccaattcctccctcatcaaaaactaaataaagggcaaatgaataaataaataaaaatgtttaaactgctgaccttcctgtcaacaaaggtgatgtgagttacaagaatctgttttctagctggagatgtgggcgcagtcatgagtatgcctccaccattaacagcactaaacccaacgtactcacaaacaacagctgcatgaaaaggccaagcttagtatcatgtgtaatttatgagagcttgttaaaacacatacatgcacacaaagttgaatgaataataccaggtgatggttaggaaacagaaaattcctgaagcatctcttctttttaatgaagtatcaaaaatactgttttattaaaatcgggagaaaaaaggctttaggccaagtgtgttgggttggccttgcaactctacttcggttacaaatttaaaggccaaagagttagagattgtgtatatgggtatgtgtgttgcaggktggggtgtgggacatatcaatacaataggtaaaatgaatggtggattgtgtctgggataatgtggcatattttatctcaaatcccaaccttatctcccaataggagatttggatcatgagcaagatttggcttaggctagttttcaattcccaggattccagctccttcatagcaccacccttatgcttactaatcccttcatctttaagacacctggataatgagctatctgcatggttggaaatagtctgggtttgttctaaattttacattagataacaggtcagcaacaaaataatgggagggggaaattagaaaacattaagtcttatttcatgtcatgtgatacagtatatatgtattttttttaataaaagaaagtgacatatattgtagttcaattggatatttacatttcatgtagaccataatggtagcggtaattatagaaatcttagcaactttcaaaggaaatttttcccagcaagatgactgacaaaatttttgaaagtaatagagagaaactgaggcataaaatttacctgaaagcagtcctgtttaaattggacaaaataattaccttttcttacatccctcttttagagttttcctaatatcatttaatacatagatagtactagaaagaaaaagacattttaaattaagaccaatgtgaagcattataccmatttagtatcattttgcccattacccttatagaaactaaaaatagaatgagtgctcagagtttgtactgtaactgcctgccacttacatgggataactatttttagttccatcgtccttattaaaggctttcattatgagttcatttatggaaatgttatctcacagagttttttttggagacttttctgagatctcaaaatgaggtctcagaaacatgattagaacatagtcatttagtttcccagcaaatgctgatcctttccaggaaagttctataaataaggaaccaaagctggttgtcagtaatttgaagtagctgggttggaccgtgaatattaatatgtaaattatagcttgtgccatctatacacaaccaggattgtatgcatatcttcccatggtttattttmagtctgaatttgcatacaaacactggtctaattgagtttttaaaaaaaattcttaagagatgccatgtgttacttaaagatgttttgttttgaaactttgtgataggtaagatccactaatgtttgtaaaatttaccatttgtaggaaatattctattctcagtaattcctggtgaaagtggtaggtgggttagagatcataaaatccagtcttcacgggaccaagctggaacatggctgggtagctggtggggtagtgacagccctgcttcaaggagagatcagaaatgagggatgagactgagtgcaaagtcaaggtcaacacaggctaatcttggcttttggctacttttctgtaaagagtaatgtttctctatttgaaggagtgattttaattcagaagtatattggaaaagtgaaagaattcctagagaaaagttaatcccagacaagatagtgaatgacatatagtttattatccagtgacctttagcacaacaactacacatatgcgcaagcgtaactgctgggctgctctggagttcgccagaaaccccttgcccttagtttgaaggagggaaagaaatatctgtaattattgctctatatcctttgcttttgacataattgattctctggcatttaaaatttatatccactcgcccataggattcttttaactctttcattgtttatttccttgtataagaacaggtctgctagtcagagagaatgttgagtatctttcataatccttgtctttatgggaccaaacatttctgccttgtgctagaaagatttttcagcccagccccaggcaaccaccattcattctactctctgcttctatgagtttgactattttagttacctcacaaatgcttttgctgcatttgttttgtattttaattacaccgtttgatggcaatgctagaaatttaggagctacagctcctctctaacatgaatgctatcttgtcaatgccttcagaagaataaagatcataattctttcttttacattgtgatttctataagaatagtttcctatcttcctggatctagatggaagatattaactttcagactaactgttcactggacaatttttctttcattattcctaaggtctttattgtacatatgatggtgtctccaatagttaaatatgcctctaactacaacatataatttaaactcatacctcacctgggattatattgatgatttttggttcaactatttctcaaatttgagatgctattcagaatttaagtgaggtctaataccataggcagggattagaagtccaggccagaagtctgaagtcatcagcttgggttctgttgatgtgaagtgaattggatcacacagagatagacatggccacagtcaggtgtgatacttgatgtgcctatgctttgcctcttagccagttcttagtcattccatgcaccgtgctccttagtagaagagagaacccttcaggtagacttctgtgaaatcctcacaaggcacagaaatttaatggcatttctgagagtcacaagggttctgtgaagtagaaattatgctctcattacattagcttaatgctgagtatattgggactcttgtaaatggacattttgttcatggatattttgttttagcaatttaaagaatgttaactagcttaatattttagagtgaacattttaaagtgataaagaaaaataagaaactttcttatctcaattaaaaatatatatgtatttttggtccacacaaatcacatcacccaaataaktcagagcactttgctagaaaaggcaagacaaggtgtttctgagagtgtctccgcatttagatagactatttagttccatacttagagatcatccactagggtttctttgagcttggtgaagaatattcagcaacttgcctaagctctgggaatgtgagcatcagttatgaatataggtcatctcagtttgtgcacagcacaytttctgtcagtccaatataaacttgtatgagtagatctgtttattgtgataactacaacttatattaacttgttgacatgctttttctaacttattttcttgggtctgcatttttcaaagatcaaaatttctgcatcttcagcacaagtagattgaagaacacataatacggatagtgattaggaacattcaggcatggggaacgggtgacatattgtttactgtgtttaaaagatgtgttataaatttcacttagtcaaactaacttgatgaaatcaagatagcctatgaggaagaataagctctgcaacttacatttttatatgggaagaaataatgagtcagtcttcttgaagttttttacattattatagtaagaacatttaagatgagatatacccttttaacactttacattttaagtgttcaatatagcattgttaactctagataggacgtttcatagaagatcttagcatctgacgtaactgaaactrcatgcatcgaatagcatctccccatttctcccacttcccagccccaggcaaccaccattcattttactctctgcttctgtgagtttgactattttacatacctcattgataatggtttggatgtttgtcctctccaaatcgcatgtagaaacatgattcccattgttggagatggggtctaatgggaggagattggatcgtgggggcagatccctcatgaatggcttagtaccatctscttggtgataagtaagtttttgctctgagttcatgtgagatctggttgtttaaaagtgtgtagcacctccccaaccgatctcttccccttttgccttccaccatgattatgagcttcctgaggccctcactagaaatagatgctggagccgtggtggtacagcatgcaggactgtgaatcaattaaacctcttttatttcttaaattacccagcctcaggtatttcttttctttctttttttttttttttttgagatggactgtcactctgtcactcaggctggagtggagtggctcactgcaaccttcgcctcccgggttcaagcaattcttctgcctctgcctcctgagtagctgggactacaggtgcgtgtgcccacgcccagctaatttttgtatttttggtagagacagggtttcaccatattagccaggctgctcttgaacttctgaccttgtgatctgcccgcctcaggctcccaaagtgctgggattacaggcgtgaggcgctgcgcctaaccatatttctttatagtaatgcaaatggcctaacacacttatgtaagtgaaatcatgcagcatttgtcgttcttgactgggttatttcctttagtgtgatgtcttccaggcacatccacattgtcgcatataatgaagttttaataactgttctaagacttagctgaagtcaaatggaatgcttctggtacttccctcatagcttatctcctggccttgactatggccatttcctattcccaccctgctctccaaggtggtattctagccatccttcaaggtcctgtgcgaataccatctcctctaggaaggcttcctttggtttcaaggcagagttcaatcgtaccccatctgaaaaccaatgacactttggagtacctcatgatagcccttcacaaacccctttaatgtgactgtgtgtgtatcgtctctctacagtgagaataaaagctccaaagccaggaactatatcttcctcacttcctcattctccacgggaccttgcgtttaataatttaacgaaaattcaacaagtatctgttgatggataaataatcatggaaaataaattccagacgaggtcagataaagtggattatatgggtaaacattgtggaaagtaagcttttcgaaatattgtaactggtgaaaagttgtccatcatagttaatgggctacctgagcaaatacctttcctgagctttttcttgaattcatagaaacttgggtctgaaagaaaacttacaagtcatcactttttttttttttttgagacaaagtctcagtctgttgccaggctggagtgcagtggtgcgatctgggctcattgcaacctccgcctcctgggttcaagcgatttttctgcctcagccttctgagtacctgggactacaggtgcacgccaccatgcccagctaatttttttgtatttttagtagagatggggtttcaccacgttggccaggatggtctcaatctcttgacctcatgatcctcctgcctcggcgtccaaaagtgctgggattacaggcgtgagccactgcgcctggcccaggtcatcacgtttagcctctcagtcctctatgttagaaaacagtaatccaaaaaaaaatgatttctttaatgctagatagtggctgaagtaggactagaactcaagtattttaaagcctgcttcacatttcttgttactaagctgcactgcctcccacacatggcctattttggtctctaaactgtcatgaaaacagatgctaggtccctgtcaaaatgtttgtgtatttctgggtgtgaaaaggtatgtgtgtgtatgtgtgtgtttgtgtctgtgctcatgtgcatggatccctggtggaggggagagaaaggcaatttgtagctgcagacttctgtcattgcacgcagcgcactctgccatggtgagttcatactccacagcaacagaacagctgctgcaaagggttggtgtgctattttcatcttgggtgtgtgttttgcatcaggctcttggcaatggcaagagtaaacctctgtaaagaacaccttcttaaccttttactgttacccacacttagtcaacagaaacaatatgtttaacaggagtttttcctgctggacagttaaatatgcagttcttgcatatgaaacatgaatattttgttcccttctgtggaatagcaataataataacactactagtaataccagctaaaatattttaagtgcttatttcaaacggaaaattttttttttaaatgccagattttttctctctagggcaacagtcatcttgtataactttgaattcacactaaaatcctctgtagcaacataaagatagaaaaatcctcctttcagcaatatggcactgtgtgcaatgagcaaatgcaatgatatagaaggaagattgagtttaagagtatcagcagcaaagtgacagaaacgctcatacattaaaaactaaaaattagacttaattggttataggtgggaggagcctattacttttggtgaggacacatataggtgggaaaaagagaaagaaaaaaagaacatatctatgacaggaagcttcacagatttcattttcataatactttttgagactaaaggaaatagaacattttctgtcatatgtgttccaagtaatgtcattctgtttctcatttgtcttttgacctggctgtataatgtatgtggtgaaacagaactcctttattattaattttttagtggctacattagtaactcttttcctgacaattatgaggaagctcttgtatattgacaagagcataaatctatcaacagccaggttcatacatagagtccacctcttaaaggttataagatactgggcaagtcatttcatttctttaaacctgtttcctcatctgtgaaatgctgatagaatcataccttacatagatcagatgtaaataaaatagtcgtaagttagcgctcaggaaattayagtattctgtgcaaatcttattaactttgattttgtttcatatattgataaatttacatctagctgaaaatacattgaatcattgtcatggactaaattttaatatgtcttaggaaaagagtccgggttgaagtgcagtggtgcgaygttggccccctgcagcctccgcctcacaggttcaagtgattctcctgcctcagcctcccgagaagctgggattataggtgcatgccatcagacccagctaatttttgtatttttagtagagatggggttttatcatgttgaccaggttgttctcgaactcttgacctcaggtgttctgccggcctcagcctcccaaagtgctgagattacaggcgtgagccactgcaccggtccaggacaagaatatttttgaaactatgagctttatcatcagagacattaaaacttcagaaggaaagagacctttgagttcttctgagccaactccttccttttatcactaccaacaacatgaagtcagagggaaatgacttgcmtacagtaagatgagcaggaagaagtgaaagcagattaggggctgaggtcttcttagtttatgtccagagatctttccacttcacccaccatactctacattagtcactaccacgaccatcatcatcattatgaccaaaattaaatctaaacaacttttcaccaagtaattccattttcatgctaaagatcaggcagttcacttccatttcctcttttgtcagatgaaggaattgggccgggcgcggtggctcacacctgtaatcccagaactctgggaggccgaggtgggcggatcacgaggtcaggagatcgagaccatcctggctaacacggtgaaacctgtctctactaaaaatacaaaaaattagccaggcatagtggcgggtgcctgtagtcccagctactcaggtggctgaggcaggagaatggcgtgaacccgggaggcagagcttgcagtgagctgagatcacgccactgcactccagcctaggcgacagagcgagacttggtctcaaaaaaaaaaaaaaagaagtaattggatgaggtgatttatgtaattcctacaacctctcagtgctaacaaagcaacattcaatgacatttacaatgatcatggtggcaagttgggagagagaaagggcatttctgaagtaataataaaatgagtaaaataagatggtagtgccgtgtgttgatattgtgaactttacatttttactttctctcatccaaatcacagtaaaggagctgaaataagattttagttaattggtagccacacatgcccacaggctggtatgccaggctttgtttttctcacactgctgtaccatatccaaggccagagtgaatttcaggtgtcatgggctctacaagggcaagactggagtaggagctaaagtcaagttcccattggagaggattgaccaactgatagaggatggaaacgaagagccaaaggggagaagggacaggaagtactgagatctgaaagcaaattgcctaacatttagaggtgagaatgtgaaatgaggccaaccagggctggtgcagagccagaacaagggaggtcagaaagctaaggtgaaattctggaaataaatatgatgagagcttattgtaggggagacttttgggggactatggcctcgatctgatgkgtctgcttgtccccagtgctccttcaaacatgctccttgaagcttcatgcctgccttagacagccagagattgaaaatgaacatatattttgaaaacaaagacactaagaccattcacaaaaattcaagaagtaattttttaaaaaaaatacagtaacatttaaaaaatatatgttatttcacaacatatgtaaaaccattaaaatacattgacatcccaacacatattttggggtgtcaaaaaagaaatatggcagggtgcagtggctcgtggctgtaatcccagcactctgggaagctgaagcaagaggatcgcttgagcccagttctagactaacctgggcaacatggcaaaaccttgtctctacaaaaaatagaaaaacttagctgggcctggtggtgtgtgcttgtagtaacagctgctcaagaggctgaggcaagaggattgcttgagcccaagagtttaaggctgcagtaaactaagctatgatcatgacactgcattccagcctgggtgacagagcaagaccctgtctcaaaaaaaaaaaaaaaaaagaaaaagaaaaaaaatagaaatagtatatgttgataggaagcttagtgaagaacattaaaaagatttgcttgagctcttggttgccatggcagagctgcgggagctccgggctcagaagatggtggactctataaagaagcctcttgagggagttacatctgggagttgtaatttttcatgttcagcaccagatgttttgaggacaggcaggtgtttatgcagcaggtgtggcagtgcacagaggactgccacatgcctctggctcaagaccaagccttgaggaccacggagataaagaagttccaatgccacctgtcccagtgcaccatgcattgcaacgacaaagccagagattcactagatgcagggagtgaggatctttaggcgaagtgacagctggacagttgtgtgaccaagtgttgatcacatgcatgtcaccctgacaatgaccaaggagatgaaggagatgttctcatccactgggatacgtatcttggccagtaaccatcagggctgaggacaggaatctgtttaacaaaaggaaggagaattttagtctttaaggatgtggggaaaagaaagagagatcagactgttattgtgtctatgtagaaagaagtagacgtgagagactccattttgttttgtactaagaaaaattcttctgccttgagatgctgttaatctgtaaccctagccccaaccgtgtgctcgcagagacatgtgctgtgttgactcaaagtttaatggatttagggctatgcaggatgtgcatagcccgaraaacacccacaggtgtggaggggcaggccaccccttcaaaggcaagtgtcatgaatgaagaaattaaggatagcaacaagtataaggcctatgtcacttgcctttggacaaaggtccctttatatttcaatcctggaaagtgaaatgaaaaaactagtgctaaaattaggatcaaagatagtacaggaaagtgtatttaagtcaaaatttcatgtggcaagtgcttctcctggcagcaggaatatccttgtaccaagccagagccttccaaggtacaagttctttttcactatataggaaccgacagactggcagggtcctctaatctggctgtgatctggtggagtttgaggagaggtgtttctgtttggtgtgaggctcctgtttaccagaagtgttgctgcaccattttccataaacaataaaacaaaatccatgagataattcatttagtggggcaaaaaacgtttgttggtctttgttttgcttggttttgttttatatgtacaagggcataaagttgacttaggatgtggagttgggaaggagagtagtttggataagatctttgaaaggttgcttatgggtatcctttcctggtcatcaagatgtggatgtrcctctcttgaaattcttactcactgcatctttcagcctggatatgatgcaaaaacatgagcggtgacttcacatttaggtttgaaagcagagcttccctcttattggctgatggttcctgaggatgtctgcagcagagtggcaggacaatctagcagaaatattttccacttaaagagatagggggtttgtgtttggatttggttctgatatatacctgtatccaggaataaacagtgaaagaggaaccgttggctacataattatgagagttgtgaagtgctgaatttggaaaaacccggctttcatagaacagaatggaatgaaagcccaaacccagcattgcttacgtagcccctgaattaacagaaccctattgagataataccctgccaacagcaaggtcaaagaagaagaagtaagcgacttggctaggatgagctgtgacttccttagagcaaaggaggggcagccccattaccaaataccacttttgcccaggcttttgtgacatgcagtgctcctgcccagcatggcaccttattttgacaaggaccttgttatctttccaccaagttatcacttgaaatgataatatagcttgtatgttgttcccaagctgtcgtatattttcctggttgtttgawtttaacaatgagaataataaggtttaatactcctccctaagaaaagatttgcttatttcccaatttgaaattactttgctaagagggatataatgagttctatagtgaaacaagtatgtgttttatcctaatttctgaaattattcctgaaaattcaagtccattgtttgtctcccaccctatcctttggttctgtcacctcagaactaacaccttgacaaagtgtttcttttttgtccttctaccctccccgcaaaagtttattttttaataaatcgtttctggcaccaacccaaaccacaattacttaaaaagaaaaaaaaaatagcccaggattccatttacttataaacttgctttctgaactttatttttaatttcagcatttttttttttttttttgagatggggtctcgctctgtcgccaggctggagtgcactggcgtgatctcggctcactgcaacctctgtctccctggttcaagcgattctcctgccttagcctcccaagtagctgggattacaggcacacgccatcatgcccagctaatttttgtatttttagtagagacagggtttcaccatgttggccaggatggtcttaatctcctgacctcgtgatccacctgcctccgcctcccaaagtgctgggattacaggcgtgagcctctgcgccgtgccattttcagcattttttgatrtcagttatgggttcattgttttcaatataagataacatgagcagagactgtgtaggtgggattgagagtgaagactgggctcattgacaacctctcatcatctcgtcaagcagagtttcccatatcctctgaatctatgcctgtgtaactccaaatattagcataaatataaaaaattcatccatttggatattttatctacatgatattaattattgaaatgaatctaaattcttttcacaatgattttggcaagaagcactggcttggagtaaagtcagaaaacatgacacatagcaaacatttatagaccatctttttaattgtccatatgaaaagaataacatctagctgattagatgtattttaggggaatttgggaaagaataaataactctatgccttatgactgtcctgatatctgctatttatatctctgttctgggcaaagaacaccaaaaccgaatgaattaattgttgtgcatgctattatgtcttggatatagtaatatcaacatttatacaaatatcgactcagtacagataaaaaatagaaagtaattttcatcttttgtttttaaagaaggaaaaatattattatagaccctgaaccttcttcttcactgaatgggaggaaataaaagatatagaagcctgaggaatataaaataataagaaggtaatgtgatagaaagtggctgaggctatgtagtttgaatctccagaaaaggcctctctgagaaggagactttgagcttggagatctgagtaacaagaagaagccaaccatgcagggaacagtatttcaggcagagggaatagcaagcacaaatgctcaggtgtgaatgattccagctgtggtagccagagtctatgatgcaagggctaggaggggtggtagtgaaaggagtttgcattgtatttgaacaccaggaggaaaccaacacgtagcattaagcaaaaagtggtatgatatgatttatagtttcaaaagattacaatggttgttctgtaagaagataccagaagaagcaaggagaccagatgtggctattttaaaaatttttcgttgatacataataactatacatatttatgggatacatgtgatattttgatatacacatacaatgtgtaatgatcaaatcacacacttaacatatctgtcacctcaaacattatcatttctttgtgttgggaacatttcagatctgttcttctagctatctggaaatataaaatatattattgttaattatatgtcttaggctgtttgtgttgttataaaattaatttataaagaaaaatatttatttggttcacgtttgtgatgtctggaaaaattcaaaattgggcatctgtatttggtgaaggccacaggccacttcccctcatggaggaaggtatagagagcccgtatgtgcagagattacatggtgagagaggaaacaagaagggaacaggaggaaactagcagaggaagaactcactcttagtttctgcaagaggaattaactcactcccgatctccccactccctgggtaaggcattaatctatttatgaaggtttcacatctatgacccaaacaccttccattaagccccaccttcaacactgggaatcaaatttcaacatgaggtgtatagaggcaaacatccaaactgtagcactatagtcactcgaatgtgctgttgcacactaggacttatttattccttctatctaactgtatgtttttgcacattaaccaaactgtcttcattcctcactccctcatccttccctgccttcagtactatatttctactctttatcttcataagattcacttttcagcttccacatatgaatgagaacatgcaatatttgtgcttttgtgtcaggcttatttcatgtaacataatgacctccaattccatctatgttgctgcaaatgacaggatttcattctttcttgtggctaaataatattctgttgtacacatttaccacattttctttatccatttactcattgatggatatttaggttactttcatatactgttattgtgattagtgcaacaataaacataggtgtgaagttatccctttgatgtgcttttttccttttctttggatcagtccccaaattgagattgctggatcatatggtagttctatttttagttctttgaggagtctccagactgttttccttaatggctatgcaaatttccattcaacagcgtataaaagttccattttctcggcatctttgtcagcatttgtaaaattttttttgtctttttgataataaccatactaactagggtaagataatacctcattgtggttttgatttgcatttcccaaataattccaggaaagagatgacattgggttagattagaggggaaccrggggatgagtacaaaagatgaggagaagttagaatctattttagaaacagagtcaacagaactcaccaaatagatgcagttaaggaagcaaggaaagtaactaagggtaacacctgtttgtggcttaagtaactgaataaatgggggtaagacaatatgagacagcaaatatttggggaatattttatgtggtatttttggaaaaaggtgaaaatgttattaatttaaaatctattatgcttccaattgaagatgaaaagaattgcctagaaaagtctggaactcaaggaagaggtcagggctggagatataaatttagaagacattggaatataggtttaattaaagccagttggccagatgagatcctccatgtaaagattatagatagagaagataagagggatcaaaaccaagccttggggaattccagtattaagagttgccagagaaagaaaccaacaaagacagaaaaagcaatcagtacggtgggaagaaaccaagagggcctgatgtcataaaggcatttcaggctagagaaagtgtttaattaaagagaagaaagaagaacttccattgcatttggcaatggaggtcacatttgtgatctggacaggatagttgcagagagtaatgagtttaagttgtacatcaaagtaaaagacacacactctggccaaaggaacagccacagaaggctggcatatgatgtgcctggcacgcaagttttggttttgtcctttggattctcctgttagatatatgtggctgttaaacaaggtctcagaaataacggcttggtaatggatgattctgacaggatacaagaaatcccagagtgttaagctcatcaggtttattgttagttcttgtttcctggaagtgtttgaagccttgactctattaggtgaaatatgactccattaaattgtctgacattttaatactttaatttagtgccagggaccacttttagtgtaaaatgtttcacagagggttctattttaaactgcctggcttttgtaactctcagttttttcttccaagcctttcaccagtgtaaccatcccaaatttgcatcttgtctgatgctaactgaggaagaagggcacctggagtttgaccagcaggaacaaaacatgttaaaattgttgcagaagatgatgaggtaaaaacacatagcactggggcacaaaaccctggagcctggagcctgttgcaggtgtttagcactgaccttccacataaccatgggtagccataggacctctttaaccctcagttttcacatttgtaaaggcagtgagcaggaattgcattttaaatatacaattgttgtcactggtagcatctatctggggccagtggcacaggagtaaagagaatttacccagacagttgtgaggaaagaaagccatattgattagagaaagcatgaaaatacgttgcaagggtgcaatgggcaaatcagcaagataggagctgactgcaaggagacaaaggcttgctggggattttatgggatggcgcttgtgctggggagggctatgtgctttactgataatgccaaagttgtagtaagctaacttgcagttttctattgtctgagggtctgatagtaagttgggcatgagaagattgttagtaatttgcacagaagggctatgtgtcctggaccatgaagaaaggcagacttgtagcttatctgctttttctttttggtttctcctgctcccaacaacctgactccttttctctaattaggacttcacaagtgtggcatctcatgtattctaaagtatatggtgaccatctaaggaagttggtttgaatgtgcaggtctagcaaagaacatgccctggatataaaacctaggaatcaccatctgatcgaagatggagatgaatgacttcaccctagggcaagaaggacttaagaagaataggaaggatggcaggaatggaggaaaacatkktggatggaaagatgagacactgaaacaatttgaagattggaaggtgagagtctgaggtccaaagctttacaccagttgttgaagaaccttgatcacaggccagccaggacctcaaaggctcaagagaaatgatgacaaggtttgcttggcttatttagagctgggctatagagcgggaagattgtggttaaatcttagcagaactgataaaaagcatgaagttgtactgagagatttttcaactgtacatagttgcagaaagaaacaacctgctaccatagtaaatatttgtgttagaactcagtggatgaaggtggaggggggaacatggactggaggggctaacagagtatatgtagtaggcaagtgggattggagtacaagggaaggatagctgggggtgacgaggttgagtctgtgaatgagaagggcttaggtcaatttctctttctacccttcttccagctcttctcctccctctttattcctcccctcttccccttccccctcttttcctccttccctctgcctcctctcttcttcctcctttctgcctttactttatcctttaaagtcttaaaaaacaaaacaaaacaaaacaaaacaaaaactgtgatgatagaacccaaagtgtactgagagatttcttaactgtgggcaggattgttaagtggtagtaaactcaagacaacatttatattgcactttacaatacataaagcactttcacgtaattaactcctttgatttgatcatcacaacaatgcctgaggctaatagttataaaccttgttactgatgaagaagctgaaattcttatcagttaaatgtgttgctttgggcttagtaattggcagagcaagccaagtctgtctccagaccccgtggtcttctggttccaaattccatgctcttctcattatacagcacaatactttttttttttataaaatgggaaagtctttttttttaatgtatttacagacagttcatggctttagacacacacacaataaagccatttttattaaatataagaaagtggagcaaatttgcgtccttttttattttctaatgacaatgctaaaagctaaaaggcaattggccattgacgggagaacaaaggaacctgaataattgataaaatgtattctaaatccagaaactgtcaaagtaggcgatgtcagagatgctgcagttgcttggttgttcgtgatatctgatgacgctgcatctcagtcataaaaacttcagggaatctgaaagaaataataatgcgccatggtattttgagcttatcaccacaagaaatactctgtaattgcatcaaatgattataaatggcatattttagggacataataagcaatgcaaaggacaggtctgcttattagtgccaaaatttgtatttattcccatrttgctttttttttcctaggcattttccggcatctcatttctgactattaaattataccccaaatagaatatgtaactacatgtaaccaacctattttggtctacattaagtgcagcagcataaatagaaactgaaaataatcagaagcatttagaatttcgtttttattcatctgatttacttggccttttgtctgggatgtaagtgattctgagcccctctccagactcacactttccccaggtttcagtacctggggctcacaatctcagtggaagagtttcaaggcaatcttccactcaggactccttatgccttgcatgcacacaaagcagcgttgctcaaaacataggaaacaactatgaggaataaaaaggaaaagcttgttccttaaagaacgagaaggaggccagcagtctttttcataccttcttgtttatagaaagcagatttttttttttttttttttttagtaaaagcatatttggagcaggaaagaaatatgacctagactgtgttgttttcttttattgtatctacaaatagtttagctgaagtgagcttttcagttattgattttaaatcataagtttaattcgtcatcaaggcaacaacaaatgtgatgtttggggcagatgcaaagttgaagtatgtctaaagaaatagcacgctagttgcgtttaatgtggaaggtaaattataacaaaacaaactaaaaccccacaaactstaaagattttcccttatagttatagaaattaggaaatgccctawtgtgcatctttccttcccaactgtacygagattttgaattttttataatttgtactaatatgtaactagaccagatataatctgttgaggctttcttgtgatggaaagcaggtgaaatcaattttcagttgaaatatgcttttcagttcactatatgatgtttgtagggcttttttagagaagggctttgcatttagacttgagcagtttagcaggcttcgtcggagggtaaatctggctgctggatctagttggaatgttttcytttcataagaagagttggagataaagtgattcttgctttcaaatacacttttaacaatacaaaagaataattgaagactttttcttttgagacagagtctcactctgttgcccaggatggaatgcagcggaacaatttcgactcattgtagcctcracctctcaggctcaggtgatcctcctacctcagcctcccaagtagctgggactacaggcgtgtgccaccacatctggctaatttttgtatgttttgtagagttggggttttgctatgttgcccaggctggtcttgaactcctgggctcaagctttcctccctccttggcatcccagagtgctgggattacaggtgtaagccacygatcccagcctaattgaagacttttgtatgttaggtgctaagtaatacaaaagtaaaagtgccactgtttctgtcctcaaggaatttacagtctggagaaggagacaaaatataaacaaacacactgataagtaaatgattacaaattgtgccaagtgccatgatagaaaagaattgatgtgcattatctctgtgctccctgttaggggcacctgacccatcaggaaggccattgatcatacccatcagtcttccaggtataccaaggacattggattgaatgtcacaggacctggattcaagccctgccatcgaatccagctgggtgtttctgggcttcagtttctgtatattcagtaatagtatcgaatattagtgggagtaatagcattgaatgccctccatgctcactggaacttcatccacaattacmatgtcttggtggctttctaagtttttttttaatttttaatttctaatttttgtaggtacacagtaggtgtctatatttatggggtatgtgagatattttgataaaggcatgcaatgcataataatcacatcatggaaaatggggtatccatctcctcaagcatttatcctttgtgttacaaacaattcaattatgttttttaagttattttaaaatgtacaaatacattattttggctatagtcacactgtcatgctattaaatgctaggtcttctaattattttttgtaccctttaaccatctctacctctccctgatcccccagtacccttcctatcctctggtaaccatccttccattctctatctccatgggtycagttgttttgatttttacattcagtaaatgagtaagaatacacaatgtttgtctttctgttcctggcttatttcacttaacatgatgaccacagttccatccatattgttgcaaataacaggatctcattgttttcatgaataaatagtactccattgtttatatgtaccacaatttctttgtccattcatgtgttgatggatacttaggttgcttccaaatattggctattgtgaacagtgctgcaacaaacatggatgtgcaggtatctctttgacatgctgatttcctttcttttgggaatatacccagcagtgggattgctggatcatatggtagctctgtatttagttttttggggaaatcccaaactgctcttcattgtggttgtactcatttacattcctagtggctttctagaacctcctcttggggagccatatggaaattttgctgaaggtgagaatatggcagcttgatgcaatgcagtgttttttcaagcttcttaatttgttgttgttttgagacctaagtctcaggagagatgcaccgaggctgctgcagagctgtagagaggagatgaggagcgagcaaaggaggtagggttggaggcgcagggcatctcccaccctgacttgtctcagacatgcccctcctttatctgttgattataccaggcttacagggaggattttatccaaagaattcacctgctaaaagaggaaaacattttaaaattactgttgtagtccaaatagtctctggaactagacgattctggattccaaatatagacatgtggtgcttaacgacagggatactttgataaatgcattattagactattttgtacttgtgtgaacatcacagagtgcacttacatgaaccctgatggcaaaacatactacagacatactacatactaggcttatgtggtctagcctcttactcctaggctacaaatctgtacggcatgttactgtacttaatactgtaggcaattgttaatacagtggtatttgtttatctaaactatcaaaacctagaaaaggcacagtaaaatatggtataaaagattttatttaaagtacacctatataaggcacttcccatgaatggagcttgcaggactgcgtgttgctctgggtgggtcagtgagtgagtggtgagagagtgtgaaggcctaagacattactgtacactactgtagactttataaacactatatttaggctacctatatttatagaaaaatcttctttcttcaataataaattaatgttagcttactgtaactttctgacttaataaatgttttaatttttcaaaactttttgactctttttcaataatagcttgaaatacaaacacattgtacagctgtataaaaataatttctttttatcctcattctayaaacttttttgaatttttaaattttttaatataatttttaaaattttgttaaaaacaaagacacaaacacacacattagcctaggcccacacagggtcaggattgtcagtatcactgtcttccacctccacatcttgtcctactggaaggtcttcagggtaaataacaagcacgaagctgtcatctcctataacaatgccttcttctggaattcctcctgaaggacctgcctgaggctgtttcacagttaactttttttttttttaataaaaaatacatgtagaagcagtacactctaaaataacaataaaagtgcagtatagtaaatacataagcgaataacagtttttctaatcattatcaggtaatatgtactccatataattgcatgtgctagactcatacaagtggtagtgcagtaggtatgtttacgctagcatcaccgcagacacatgagtaatactgtgacattatgagggctatgatgtcactaagtgatagaaattttttagctctgttataaccttataggtccacatcatataggcaatccatcagtgaccaaaatgtcattatgtagagcatgactgtattagttcgttttcacgctgctgataaagatatacctgacactgggcaatttacaaaagaaagaggcttaatggactcacagttccgcatggctagagaggcctcacaatcatggcagaaggtggaaggcacctctcacatggcagcagacaagagaagagaacttgtgcagggaaactcccctttatgaaaccatcagatctcgtgagacttactcactatcacaagaatagcatggcaaagacccgccaccatgattcaattacctcccaccaggtgtctcccacaacacatgggaattgtgggagctacaattcaagatgagatttgggtggggacacagctaaaccatatcagtgactacagtactatagcagttgaatagttttttttaaatcccttgagtatcttatgatctataaaatggcagtcaagcctatcctgtggatatttgcaaggcttataaatattgtctggaagagaaagatgacttaggagtatattataactcttgatgtttttattatatttgtcattaatgtgcacaaattataaatgtattatcattaataataatttatttaaaaaagtgatgggatatcataaaacccttgggtgaattcaaacatggccactttgtatgacaaattacatgcttctatttctgttccacccagggtttcttttgagcagtggaaattcatctggaaacttaatgttatcccactatagagagccattcttgatgtgccactaattctgccaaataggctgacttgactactctcttaggatacagaattatatgaagmaaaatagagttgagaaggaaaaagtacaaacgttgtgtgtgcatataacaaacagatgactgctttagacatatttggtctgtaaacacctgtggaatcttgcctgtgtctctaatttttccagattttgctcatgggagagacacaatttgttctttgaatgtagccattatattttaacatacatgctgatttaatcatgctggtcaaaattttctttttatagcatccagacagcttgtgcatataactacatgcagttttattttgtggccaactggcaaccatatggaagtcagttaaaatgtattttgattatatgactctgtgcacataggcacatcatctcaggaaggctcaggtagcatagaggcaagtgaattcagcctgagattacagtaaagacatgaatctgatagtctggcatttctggactcacactgatttcttgaagaaaagcccatacagttggaatcagtgccttaaattaggtttcttaatatgatgagctcataaaatatgtgttgtccygccttcttcagatgtgagagttgatgttacagagatctctttggtaatatgactattttaataaaatattcacaattaaaaatrtatagaagaaagcagcaaggaaagactagaactaatgattagagttgttgaaaatgcatacataatttactccctttttaaaaaaaatggaactgggctattctgttgtacatagacttttgtcaaaatcaaattaagaatactttactcagttttctttttcttcctttattcatctctgtaaatatgattttaaaggcccttgaaaacaaaataattatcttattaaaatttagttacatgttgtgtttaaaatgctaaagttttggccagcygcagtggctcacgcctgtaatcccagtactttgcccgagatgggcagatcatgaggtcaggagttcaagaccagcctgaccaacatggtgaaaccctgtytytactaaaaatmcmacaacaacaacaacaacaacaacaaattagccaggagtggtggtgcgtgcctgtaatcccagctactcaggaggctgaggcaggagtatcgcttgaacccaggaggcggaggtcgcagtgagccgagattgcgcaacagagtgtgactcagtcttaaaagaaaaaaaaaaattctraaatttatcggagaaaacaattgggatctatttttagtctcaaatgtaggcatatacaaaaataatacatagtagttttctaagtactattagacatttgtttcccattttgccatttgctttcagtttacctgacatgaagataaaaatgatagctatttctcacttggcatttgaaagacaagagcaataagaaacccagcaaaactcctagagaattttcatggggaaaataagcatattgacattctttgacttttgtaaattgattttttggctccagctgctctaaagccattaagagttagagttaatcattcttgatttttttattgttagtcagttcccttattcataacactgaataatagcaatactactgagttttatttgtgttcacatttagtgctatgttaaaaaattcacaaagtaacatactgaaattcttgcaggtaactggtaaaatatgtagtctttagtagactgttgattgatattctagtaaaagagtaaatcttgtgaatttcagaggtggtcccaagatggtcttaaccctactgtgttaaaaaatatcagcatctttttcctataaagacaacctgaaggctcttttgaaatatgtataagtgcttctttttaaaaaacttattgatcaaatcagcttaattagctatgaaaggaatgatccttcacccctatgttaatgtctgtttacactgtgagtttgtaaaagcttctgatagagattgatgccatatctaataaattatcccactatatattcataaagtactatgattatatctatatgaatatatatataggtgaatgtagattcatatcaaaaattgaaacccagagaaaaaacttggaatttggtaggcagaaccatgaccctcctcaaagaagtcctcaccctcatccccgaaacctgtcagtatgctctgtaacatgattaagggcaattaacattgcaggtagaattaaagttactattttagtccatttgtgctgctataacaaaatgcctgagactgggtatgtataaagaacagaaatttgttttctgttctggagcctaggaagtccaagatcaaagtgccagcaggttccatcatctggtgagtactgcatcttcagrggggaggggaaaggaacagtatgttctcacctggcagaagaacaaaagagcaagctaccaaacactgccaagcctcttttatagaggccttaatcgcattcgtgagggagcagccctcatggcctaattacctcttaaaggctctatctcttaaaactactaggttggcaacacctgaatttaagagggggcataatcaaaccatattattactaatcagttgaccttaaaatagataatcctggatgatctcggtgggccccttgtaattacaagtttccttaaaagtggaagagggtgacacaagagaagtgagagtgacgtaatgcgaacaggactcaacacaccattgctgactttgaagaaggaggcctgaatttcaatagccacggaaggggacaacctttagaagctggaaatggcaaataatactacccaaaagccctcagaaaggagttcaaccctgacagtacctttattttagctctgtgcaacctgtttcagactgctgcagaaccgtaagataataaattcatgttgttttaaggcactacatttgtaataatttgtcaaggcagcaataaaaaaccaatgcagcaaaagacaataacgtctgtttaaccacacagtcacggaacatctattaactagcaacttattaaatacagcttactgctgcaacatctttggtgtaattaaaacatcctccatgaatcagagtgagaattatacttaagtgtctgccaattgccatgataakagaaaagcttatgatctctctactaagtaccttaggaagacaagggcccaatgatatgagcagtgtggtggaaccccaaacatcttcccactttcatgcacacatatcattcattctcctttttcccaaggttcgctgttagtatagaggcacaatagatcatgattagctctgggcatgttcacagtttagctgcctgagcagattaatttgagagtccaggaaaagcttattaaacagattatgagaactagacaagacttttgagaccatctgtccaaaactttggttttaccagtaagcaaattcagacccagcatcactcagctggtaggtggtaaaactgagaagagaatccatgtattttgttttttcctagttctgtgttgttgcactgcataatgaattccagccagaaccacacattcagttcctgactagtccacaattagaatcaccatcaagtcaaacacaagtgaggcattacatccaggaggtcatagttagttgtgtgtgtgttccctagatagattccctgaagctttctcatcaacaccaagaagctgaaggggaaaatgaaagttccccttcagttcccctcaattcaagagtaattgagaccaacatcattcatggatattaataatatgaccttttttaaagaatcaccaaatcattacatcataaagaacaatgatcttatattttactaggtttattagttgcagtctcagcctctaggttgctagaaagctctgggctcctttggatatggacatggccaaatctctttaactttctagttatggcactttaggcaaattcaacttctctgagtctaggttttctcctctgttcaatggaactgacaattctatgtcagagagctattgtaaggattaaaggaactaatatttgcaaaccccatactgttgcttggaataaaacaggtgctgaataaatggtagctatttgattgttagttttaaaaaatcttgctagaaatcattaagagtgtatttatctaagtgggggaaaagaaaaacctaagtaagacccttggatcttgaaagaaagaaaaagagagaaatgattgtcaacacaaacagaaatgcttgaggaacttcaagggctcaagagtcaaaggacaggctagaaaaaaatgtcagagaagaaagagctaagagaagaaagtcaaaggaaaggagagaaggggagaatggaaggagaactgagaaaccagcagtgtttttttaaaggtgataactgaagaaggtgagcagaggaagaaagaacacagtgagtaattgaaatcaccagttattttcttctgattcatctcttaaaggaaataccttctaagagagatctttgctcttttgtgtgctggtgaatgtaaggtgagaatctctcctttctttttctaatgatgaccctgaacaaggccgtgctcttcttttaaacatctcttctgtttgaagctctgttacaatagaatcaaatagggtctccttggtttatgtcactgatctaaggttgaatgatgtacttgacagatccttttgaactgccccatctgggaactgaaccaaagactggatcgccagtcatggtactcacaattacctttccctttccgcacagtccccacattcactacccgaaagtataaaatccatctcataagatgcagatgaagtagaatgatgcggtttcccaaacttgcctgattatacaaaagcccagaagcattgctgtctggagattcggattcttacctcaaggtgattcttatcattagaaagtgaaaggtacagaaatgaagaaactttcgagtaagcaacgtttcctaccaagggactgggtggttctgaatataacaccatctttctcctaacaatagaaggtgacattttgacaaataagcttaggattcgtattcttccctaaggtatcattttgctgagctatcattttttttctttctttttatttttgagacagagtctcactctgtcacccaggctggagtgccgcggtgtgctcttggctcactgcaacctctgcctcccgggttcaagcaattttcgttcctcagcttccagagttgctgggattacaggggcccgccagagtttctggctaatttttgtatttttagtagagacggggtttcactatgttggccaggctggtctcaaactcctgacctcaagtgatgagcttaccttggcctcccaaagtgctgggattacaggcatgagccactgctcccggacttgctgtaagctatctttttgccactcatgatgatgattgtatggatgactctctggtctgtgttgtcagtattcaagtggtacctccactctgtcacatcttcattttgcttgtctagcagacttgctagtcccttctgtcttgttccatgtcaggcttggacatatgaattgcaatcacattgtgagacaattaattgtccaatatttctcaagactccctgtcctttagaaactattttgcattcatctttgagtcctcagtattttgcctagtaaacagggtttgtcaagtgaatatccaatatagactcaggaagatccacatggggagtgagaaaattgagcgaatcccaggaaaagaacaggaaatggaggtaaaagactcacgtaagtttacccttctatccaggcatgcctccagacaccagcttccacttccttatctgtctggaattggtgttgaattgatcttcgaggtcagtttgaggtttcttactctctatatgagtctctgatacttagaatgttattttgtgctcagattgccagaaatcatgaagaaatgaaaggggaaaaatggtggcaataatgatgactaacaatgttttattgtgtgacatgaagttaaacagtaataatttattgttatattgaatgctgcagcattaaactgctgcctccagtgttaaaagcaatgctcacaagacagatcttatgagaaactctatgtaacagcaaaggatcactgaaatattcagatacagaatttacaatagttgcattagggcttcctttgaattaattaatatttcctctgagatgactcctgccaagtggttttgcttcattcctgatttaattgctaggaaaatcagaattattccagaaagtgaggctatgaaggtttcattgtaggaaaatcttgtgtctgaagccgtgaggctggacaaagggaaatgagttgaatgctgttgtgaatgggcagaagtcagcaccagcaacttccattcatttcgaagtaagagttgataagagaattgactgttgaagtcaaatctccgtatattttcttatttccttctttgcatccatcttgcaaagcaaatttttaagagaaaacgagtgtttcattcttgatagtgaattgctctgcttcttcagcaggaggtgcaggagaaatcctatttgcatcctttccactgctcttaacaagcccctaaaggctgagttaatgtttatttgtggcctggagtggccaaaagggaatagcaggaattattttcttcatagaagtggtggagaatatgagtgcctccctctataaactggagaagatttacctgcacaattctcctctctgctttttagtactgcttgggggatgaaagggacccatggactttggcctcagacacaccaggctggtttcaaattttccttttttctgaaatccacagtaagccacttaaactctctaagccacagtattctgttctgtacaattggaataacaatgctgtgtactggaacagcttcataatttgtaggcccagtactaaatgaaaattgggacccttttgttcaaagaacatgaacttcaagacagtaatggcagagcatcaaataggtgtgtggcccttctgagcatgggggctgtaccactgggcaggccacataccacgaagttgacctcactgtgcagctggattggctgttggatgtcagatatctttccctttgtatctctgtatctcagagagtggatccctgaaaatggcatttgcactggctgctagctagatttagccatggaaggcagtagtaggagactgatggtgagaggcacggggaagccaagttatttccctcttttctcctttcccctgtctctatttccctttgaaacgtatctccaatagtaactgctctcctctttcagttccagcatacctaggacagcccaccttctggggtcccacctttcctgatcccactcactgctagtcagttctctgcaggcagcccagctcctcatgctctaaaaccaccatttccttggttcctccagcctgacaggtgctagctgcttcctgatataactaatatcttgactacctccctgttccctatgaggcatttcagctcttccaagcctctttaactagttccccttattaactattctttattcttcatagaatctgatataagtgtctaccttgaaaggttattacaaggaacaaatttgtctaaggcagtggttttaactgtacattgcaattcatttgtgagtaatacaatcagtttgatgggtcaagaccggtagtttagaacacaaaataacttagagcagaataagaaaacatggtagtgcattgtatgtattaaggtacatatgatttaataaagcttttagttgtctctgtgtgtatgtgtgatgtgtaccatttcatgctgtaaaaatgtattactttctagcaggtgggagaaggaaagaaaggccaatggtctaagacttctggtacataattagcactcaataaattgtagaaactattgttgccatccaagaccatgccatttaaacaaaaggcagtcagacagcccaaagagtttaccattccaactcactttagctcattagaatagtttcatgtagttgggccaacttgtactaaaatggccaaagcgtttacttacatttgtttgtttacacctagacaggcccagcttgagtcaccagccttggctgaaagagaagccagccaggttcaaagtaaagaaacagttttaaaataacattttatttttctgtgagtcatagcaaatctgtccctgcaacatctttctcctgcagctaaatgctttaaaatggtcaggtctcacccaggaaagtgggactgggaggaagtgatgcgataaaacagcttcccaatcagtgcattagtaggagtgcaacctctggcattcctcttttttcagaagtatcaaaaagctctgcagagataactgtgtctccagatggccatgagattggtaaatgacaaatgtttatcagcctttcagcacctgctgatggaagaactaaaaaaaaaatcgcaagtgactttatgagcccacagccaccccagctgtaatgggtgctagtagctctgtgttgctgacctcacatgggtaaaggaagagcagaagaatttttagtcccttggctacttcttatctatttcatcaggtaaggaaactcaacttgaatcctttcaactctgaagaatggtagatctgaggaacaacaaagagctataggtcatgtggatttctctgctcagtcagagagcccagaactctccctggagctgaagatagcccttgcaagctatctcatgatggttttatagcacagtgggctcactcatactggtgctggttttgagcatctatgttgacaagacaaatgtctgtttctactactgcagaggatagagtttaaccaaagtcaggtgacagagaaaaagaacagaaactgataacacttacacagtatccttatatagcaggctcttgaataatgcaggcattggggtgacaaccacccttacagtcaaaaatctgtttataacttttttttttttcagatggagtcttgctctgttgcccaggctggagtgcagtggcatgatcttcgctcactgcaacctttgcctcccgggttaaagagattctcctgcctcagcctcccaagtagctggaattacaggcatataccaccatgcctggctaaattttgtatttttagcagagatggagtttcatcacgttggccaggctgatctcaaactcctgacttcaggtgatccacccgcctcagcctccccagctgtgtagataacttttgacgccccacagccttaactattaatagcctatcattgactagaaatcttactgataacagtcttttaatgcatatgttatatatatacattacactatattattacaataaagttggaaaataaaatgttattaagaaaatcacaaaaaaagagaaaatatatttactattcattaagaagtggaaattgatcatcataaagtcttcctcgttgtcattgtcttcaggttgagtagctgaggaggaggaggaagggaatgggttagtcttgctgtctcaaggatggcaaaggcagaaggaaatccgcatgtaagtggacccacgcagttcaaacctgtgttgttcaagggtactttatgttgtccgggatgctatattgagtactttatacatataaatttacttaatcctcacaacatgcctacaaggtggatactactattgtcctcatttccagctgagaaaacagatagagaaggcaaataatgtgctcaaatctgcacagttaattaatcatagagcccaaattcaaacaaaatagtgtggctgccaagtcaatgctcttgacctctacccagactgggagccagagggtttgcattctaattttatcattaaccaatctgactgatggggcaaatcaaccctactgcaatctcctcttttcatctgtaatataaggttattgcttgagatattttcaagtcttagtgccacctcccatttagagctttagtgttgagaaagatgatattaatgtattccgttgtcctaaatatttcaaacacgtcagtttctacttttccagacaactccaatggggatatttttttattcctccacttcctaattaaggctgaaagggccccatattcagctgctgagtctctgtctcccgccttcttttcctcctgtacgacctaaaactgtcttttgtctttcagcacttggggagaaactctgggaagctttctaaatccctaaatttgtcacacccatccttaaagcagtgctgaattaaaaagtgggattcgtctaagcagaggagatacttaaggaaggagaggggctacagcactaaatgatgtttccaattaagagaagtgtaaggtcagagagaaactccctcctggatggagctcttcaccacctgatgagctgattaaatatcatgccgcaaaaagtaaatgtttactccaagccaggtgcttggactctaaagaactctattaggcaagagtaagtggtttaattggctcaccttcattcaactgttagtatgttcctcataagtgcctgtcagagagaatcttttgtgtttcccttctaacagctggctcataaaaacataaactcatcttacaatgttaartaaggatcttttaattcctgttttctttcctccaatttgtattaatatgataggagagaaagaaagtgaaagcatgcttctatagctggctacttcatcaaacttaatggaaccatattttgtaattcattctataatttaagttttggtcattttatctcttaaagatgaattccaggccaggtgcagtggtttgtgcctgtaatctcaacccttgagaagccgaggtaggatgattgttagagcccaggagtttgaaaccaaccaatatagagaccctgtctctacaaaaaaaaaaaaaaaaaaaaaaaagtcaggtgtgatggtatatgcctgtagtcctagctactcaggaggctgaagtgggaggattgcttgagcccaggaggtccaggttgcagagagccatgatgatgccattgcactccagcctaggcaacagagcgagacactgtctcaaaagacacacaaacaaaaaaatatgaaaccctagctaaacactgtggactcaaaatamcctgtgaaatcacccaaccgtagtatttatctatgagaatgtttcaaagggagatatgtagttgtatgactatttcacgcagatatttgttattaataaaagactttgtggtcagcatgacgtgttagctacagttgaatccatgcttctttacattttgtggtttggttgttgtcgaatttactttccatgcattatttccaaatatatacttattatttcatcagcttagaatggtttggatagaaaaatatatcaaggtctcagaaatgccccccattaacataagggtagccatgacttgaacccaccccactggtttcctttgtctttctccatttctgattctctttctctgtggttacctaggatatataaattacttgactttgaaattcatgattaactcagaaagttatagctagtgattcacaatatttgttttaaaaacagtatgaagaatgtagaagcttggtttttaattataataatataaattagtatcattttatgtactcaaatgccacacacatatgtataaggcattcctatggaataatcttaacctggttctttgacaatttttgtaattcattctctagtgaaatatttccccaaagtgtatccacagattactatctcaccaatatgcttccggaaaaaaagtgccatggtctaataagtttaggaaaccttgcacattctttttccttgggatcaatcattagtattagcagatttagcactaagaaatcctgtagtagagaaattcatttacttttaattcagtatttctcaaaatcattttaccctattactcaaatccctgcttttattctgggaattgttacctctcctttcctttgcatacacttgagaaattgactctagaaatactagccttatgaaatattgatagtaattgctatggtttgttagactcctccaaatctcttgttgaactttgatccctagcattggaggtgggcttaatgggaggtgtttgggtcatgagggcagatccttcatgaatacattaatgccctccctggggtgggtaggaactgagtgacttgttgctctattagtttctgtgagagttgtcccccgactcgccgcagagctggttgttaaaaagagcctggttcctcttccccctctctctcttgcttcctctctctccatgtgatctctgcacacaccagctccccttcaccttctaccatgagtgcaaacagcctgaggccctcacagatgcagatgccagatcattgcttcttacacattgtgtagaaccatgagccaaataaacgtcttttctttataagtaactgagcctcaggtattcttttatagcaatacaaatggacgaagacagtactgattatttgttgggcatttcctatgtgcgaggaactgttacaggtattttggcagttgtaatagcgaggtatttattttggtgctttaacagagactaaaatggctgctttaaataagattgattatttctctctcacatgaaagcctaaaatggtgagcagtgtagcaacttagggcagcaatctttgggtcatccaaggcatcagataccttctgtggtgttgtttcaccgtcctttgaagtgttcctttcttcataggttgaaaccagctccttgtacctcatctggtcccatccctaagaaaagagaccaaagagccatccttgagaaaagagaccaaagagacatccctgagaaaagagaaaataaagggcaaacagcttcttgttaagaatctggtctggattatgctcatagctcattgtccaactgaataaattgctcaatttattgagctcataaattgctcaatatgacatggccatacccagcttacaaggaagtccaagaaatagtctcttattggggaacatttgctctcctgaaacatagaaggttctattatttaataggtagaaggaaagaatgagtattacaaggcaattagctttctctgctgtgtttttacctcattaaatcctacctacaacccatgaaatcagtactttgtcttcattttaatatgagaaaactaagatacagagaaagtaaaactaaagtcacgtagcgactattcgcttttggttttgataccatgctacctaattccatagcctgggttcttagctgatacacacagttgcaatgcctttccagaaaatttctagtagtttccaccattcctggacctattcttttctaactttaaaggcaatccatcttctaagtcagtgtggcagagactctagtttcttcacccaaaccatgttctcctgtctttcttgggctcatgtttaaactatatttctcatcttctcttaggtattaccatatgactaaggtctagtaaatgcaatgtgagaagatctgttgtataccacctccaggcttggcctgtaaaaacttcccatggacatgagctcctccatgccctttcccctccagctagatgaattggaaatgacacccaggacaactggaaggccatatgtcaaaatggacaaggcttgctcaccctgaattctagaataattttgtggaggagaactaccctaacaatctgttttcccacctagcaaaaaaaaatgtgaccacaaaaataaacttctgctgtgtttgatccatttgaaagtttttgatctattagttctagcagttagcttcctctaaaaaatacaattgattaccatgatgtcatggataacaagttggcaacctgggtcaaagtcctattcttgtttttttctagtgataagaccttgggcaatttattaaatctctccaagtctcagttttctcagctttaaaataatcttcaatcatagtgttgttctaagaagtaaattagtttatcttaaaaatcctattccctgttaattattccattctagcaatcaatttgtgcttattctagttgtcccactgtttaaaacacacatgccttagtattatgaaaacatttcaaaagaaatatgtcttagatttctacatttatattagaaaactttcaaatttatacttcatgccttttaaaaaaataatactagtaaaatgaaagaatatcagttttggaatcattccacagtcctggataaaaatacctgttagaccacttactagtggtatcatctatgtgagactcaaattcagcatcagtaattttggaagaatggtagtcctactttcagaattgttaggattaaataaagtgctaaaagtctgtgaaatctccttgcacactgatgatttcccttctctccccaaatagatttccatatggagcacttttagtcatttttgctggactgcaatcacctttctttcttcaaatgttaaaactgaacagtagtagctagcaatttggaatctctagaaagaagttttttttattattatagtgctgaagctcagctcattctctcaaggagcctatggatttggagtgcatcataagggaagaagttaacctcctgctgtattaccagagaccaaggacaaatgttggttgtcacctgcctaaccaggcaagtgatagtcacagactgtccatctcacaacaaaacaatgctaattttgttgagggatagaaatgttgtagttgatctcattttctctagcacagtgtccctttttgaatgttccttctcaaatagggcatggtataaactctgcaagaggggagttccatttggaagacatgtaggcaaacaacattcaggctccacacccacttcgcctgctgagatttgacttattacacaactgcagatgctggtcaattagtttctcatactcattcgtatcacagaagggatgcagtggttataaattgcactgattatgcacaccttggcttaccctattgttgcataaaaataggcaaggcatgttagtcattgcatagtcttttcagtagaaaggaaaagtgattgagaaacagcaaggaaaattgtgtttacagctaaggtttttgttttgttttgttttgtttccactccgttcagtgtgtatataaagttaatgcatttttaacttaacagcaaccaacaacagcttcactttgagtgcatgaaaaacactggggcttaagtgttgatttgttgccaggcatttcctttgggaatccatgtaggctgatcatttacctgggaaatcgtgtgtgtgtgtgtgtgtgtgtgtgttacctttacctttgtaagggacatcataaaacctcaatttcctggtgtgttccagttaattttctgctttattgaatgtcactctgaattccctatttcctttaacttttgtgttgaaaaatcattcaaaagactactgagccattttcttcttcattaagaaaaatattgggttagacttaattcttgatagctgaaaattttggagcattgttttgtttgtttgttttacatttttgaaacaaactattttgagaccgtaataagaacaatggataatcttcccagaaatcagagagagaaagagagagaattctgcataaatttatagatccttgcagcccacatttgaggccccagcaatagaccccaggttaagaattcctgccatagagtgttttgacattatcattctaaatatttaattttgtccaaataaaaatatagacagagaaaagggaacttagcaaaaatcttcatttacattcaaaacaattcaaggtgcattaaaatcatgaaaaactttgttcctctataggccagggaagtttcttgctacttatttcctttattaaagtatattttattgatttgtctttttcttttaaaaacagaatatccaatgggtaagactgaccaaagatttggggaagttgattctaaataggtgagctgtgttttaagagttcttcttagtactcttcaactcagcatgtggaaataaatttcaaaagcttttcttaatttcacaaaaacaaatataaatagttatggggggaaataaacaacaggccaaataccagatggcaactcaaagcacattgtctgctctcttgctctaagctactggttctcagtaggggtgggacagctcccaaaagggggtctttgggaatttgtggtgggtttttggtagtcacaatgttaagaggtactataatagctatttagatggcagagttaggatttcctgtttctttttctttttggtatccctcatgactatatagtctccccaatatattcacatgggtgaaaatcctattcgtaatgattgaactcaattataactccatttacagataaacatgcacaaaattttcatggttttaatacactgaattttccaagggtgtgtgaaattgctgtacatattgacagaagattgttgtttgatttggttaagaactttttattattattattattattattatactttaagttttagggtacatgtgcacaatgtgcaggttacttacatatgtatacatgtgccatgctggtgtgctgcacccattaactcgtcatttagcattaggtatatctcccaatgctatccctccccgctccccccaccccacaacagtccccagagtgtgatgttccccttcctgtgtccatgtgttctcattgttcaattcccacctgtgagtgagaacacacggtgtttggttttttgtctttgcgatagtttactgagaatgatgatttccattttcatccatgtccctacaaaggacataaggaaatgtggcacatatacaccatggaatactatgcagccgtaaaaaatgaagaacttttttaagagttatttttcactttagaaaatcagctagagaccacaatgctgtttatggtattgaagtccccatgagaatgcacctggatcagtgtacatttgtaatgatcagattcacagtgattccatgtgtaggtataagcttttctctacttcaccatgtgtccttgtatagttattgataggggttggctgtggccccctcccaaatctcatcttgaactgtagctctcataattcccatttgtcatgggagggacccaatgggaagtaattgaatcatgggagcaggtctttcccctgctgttctcatgatagtaagtctcatgagatctgatgattttataaaggggagttcccctacacaagttctctcttgcctgccaccatgtaagatgtgactttgctcctcatttgccttctgccatgaatttgaggcctccccagccatgtagaactgtgagtcaattaaacctctttcctttataaattacccagtcttgggtatgtcttcattagcagcgtgagaacagactataacagttatcctgcatcttaacatatttcaatattatttattatatacttatatataataatataaaaatattcattgtgcatttatatatcataatatatatattatgtaatttttcattctgtcttataatttattctaaaaattatatttttaagttaatttataacttattaagtcagtgtttctttaggaaatgtgccctccgtcaaaattttattctttttggtctctttgctagtatgctactagctaaagaaaattcattcccactaattctggattcttatagttattcacagccatgctgttaaagagacaagtgaattactaccttctcagagttgaactcaagggggaagtttgactattggctggcaaaataaagtagtggaaatttatttcttttgttctcaataaaataacctgtgaaccatcctaaaactaaaaaaaggaaattatttatgaagagaagttgtatcatttaaattcgttttctctcttttccctttatttcagaaaccttccataataaaaacttggatataatgaaattttgcataaatgacatgtgacaacctaatttagtggaagccagggaacctgctaatactttaacttcaaagctcttccattttattccttcattacttttcctcctttcaaagcattctttagccatgcaccaagttcgaacaatgacgaatcaaatcctcagagccaagaacaatgttctaatatttccatgcaattaattgctacttcttggtgagcatccagtatacttgattctctcatagaagattctccaagcctgacactcggttgaagtctgaggacttcactgaggacaaagagggatcaaatcttcccaacaaacagtgaactcaccatgcaaagtgaatagaatcccctaatcaataaatcactaaatatttatggagccccgaaatcatattgtgacaagatttttcaaaaaaaaatgtagaaactaagttatgatacaatcacatgtcaggaaggtatattggagtactacttgtccaggactccactgacacccccttgtgctccctatgtcattttgatgtaccaggccattcactgtatctataacgtgaatttttgcccctattttcaatgtcccccatcctattagcttttcctttccagtaaacttctccaaacccttcctcagtgtttcaaaggcaacaaaagttatcacaacaaaagtaactagtatttcttgagtgttcacagtgggctggacaagcaaagtgctttacctgcattgcctcagttaattctcttaataacctatgacatcagctctattattaacctcattatacacatgggaaaatagacactactatgggctgaatatgccccctccaaaattatgttgaaactaaatccccattttgcagtattaagaggcagggcctttttgagtggccagccttcatgagtggattagggccttatgaaggggctggagaaaactaacttaggccctttttgcctttctatcttccaacatgtgaggacatagcatttgcaccttctaccatgtgagaacacagcaagaaggccctcaccagacaccaaatgtgctggtgccttgatctttgacttcttagtctcagaactgtgagaagtaaatgtatattatttgtagttacccagtctatggtattgtgttatagcaacatgaagccagacagaaaaatttacagttttcatcacttggcagaggtcacataacaggtcgatttgattctcaagccgtctttactattatgcttacttggcttttatctctgtagactttaattgctgagttatctttccctgagtcattgctgcttcaaatctcagtctttaggaatcacttctgtaatctgctgattaattatgcatagatcataaaagttatttaatccagctgctgtccagagtcaatatcactatcctactcaaaaatctgcaacaatctaccacgaaaaatcaattctaaactccttagtctgacattaaacagcctgataatctgatccaatccagcctctctgcttctacctatcttgtttacctgtttgttgattcttattcaattgcttccttgatggaggactttcccacccactccatcactacctcttgtttctgcctgcacacatcatttccccaagtcttttgataagaaagatctcctttttacaactatttctctgctctctcctctccaacatatcttcctgacatgtgattgtatcataacttagtttctacatttttttgaaaaaccttgtcacaatatgattttggggctccataaatattttgtgatttattgagtaggggattctattcagtttgcatgtggagttcactgtttgttgggaagatgtgatccctcttttctctatgcttccatcatgacctggatatacttctagtatggccctttctaattcttcacatgcatgccttcactggactgcagactccaagacaggggccatgcagtattcatctttgtgtctttccagttactccacaacaatttattgagtgaataaagaaaatgctgagaaacgaactcaagaggttttgtagatttaataccattgctctgggtatcgcaaaagataatggctattaatgaattagtaccccacttcccaccacctcaccctgttgacatagtatgatagaatgtgtaaccacttaatctaccttaagatgctattgggcaacaacaatgtcttgactttaggggctggaaagcaaatagtatataatgtccaattgctcttgtttggggcagagagcacagatttaagaaacaaggatacaataaaatgaaatttggctgcagtacaaggttaatgtctctcctcacctcccaaagagtaccaagggatcattcattgtcacagctgttggggtttagagctctcttctcatccaaatgccagtactttccacaaaaagctcttccccagggatgccctaataagccagtgtgtcctgtataggtgagacttgccctggctgtctctatccaagtggtgacataagctcatctaaagcctttcattaatgcaaacaatgacccagcccatggtggcactgattcttgaagctgaagacttggagaaggagcctgattttccatcacactgattgttgttttcagtaagatgtttagcttttcaattttctctctgccaaatacaaattagtgtatttccaacatcccagagtcttagctgtgcattgccagcttccactgcttctccttaattaacaaacagctgtagaagagcttctcaactgacatggggggaagagctctaaggaagatatggactatgtctcatatcttcaaatcctccacagtcatctcctgttagatcaccaagaagaaatgcccagtggagacacttcagttcaatgaaaagtttatgactagttgggtttggtctccattttgtattaatgtagttgggttcagtctccaatctgtatgtatgtagtttcctatcccagagagcaggacaagaccatataagctctatttatgtttcctttgactctttagctgaaagcctaggatgtaggacaagtggctaacctgttttagaactttcttcctasgctaacattctgaacttggccttgtggattttacctcttaaactgcaccaaaaaccatggaaacaaagggcttacagcagtgttagcctaatctgagccctctataccttcctatactgtggccacagcagtaaagctacgtggtcttgcaaaagaccttccaagagaaggttggctacagaccttgcttatcacaccatgaacctgaggaggaaagaaaatactcacaaatagtttagcccctttcataaattgttggtccttaatccatttttgaaccctactctgttgggtggaatgtgtgtgtatctgcacgtgtgtgtgtgtgtgtgtgtgtgtgtgtgtttagaaattcaaaaaaaatgaggagatcttggtcttccatagagggaagactgcattatcaatagagtctttcttagcagaggatgaaggctcctgtagctcctaatcttcccatttgtgcacaaatacstgaattctgattaggttgaaatcaggaagacactcttttgctgcttagtggccacatctagagctaacaacattatcagtgggatggtgattcatggtttaagaacataccctcgccattccagctactcgggaagctgaggtaaaaggatcgcttgagcccagagtttaaggctgtagtgtgccatggtaacacataactagccactgtactctagcctgagcaacatagttagaccccatttcttaaaaacaaaacaaaaacatccttctcctcttctcctcccccagcaattctggatggctcatctaataaagtacatatattttacctaatctagtcaaatgtaatgacacaataagattattattattctccaatccctgctctgcaacatatttggctgaacatttttggctgcaacatttttggctgaagagaatgaggtttcttcctccctgaacctgggaactaacatgaggtgttttcttccacttggtggagctgtgcacatgtgtgcttgcggagaaaaagaagagtcccagcaggccctctactccagctgttggagattgagctttccagtgcattatcctggctttatgcagtgatgccttccccctgatggcagtaaaattttaattagagggcaatgtgcattcctatataatggagtgcacacatggcaggaagttaacaggacacgtttgcagttccagtttcattgtcaaccagctgtgtgattcctggcaatttgctttattttgttgtgtcacagttcttgactaggtaaactggagagtcatctctggtctactttcctcttcagtttggtggaagtttcacgtaaaattacatgtgaaagtccttgagaattgaaacaatgggcaaatctatagcagaatgcttgttgaattctatcagctttcccaaggtgcaggctgcccatgtttagtctttctcactttccaatccattttccacactgcagccagcgtgttttttctcaatggaaatctgatcatatcaacctcttttttaaaaaaaatcctaaatatcttctccctctcacagaataaaaatcacaattccttaagaaactgtcaaagccttctcaatctgtgcctttcatctctgaccattggtatctttcttctgataggataaaagttcattgaatgttcaagccttctcttttgcttttcagagcttggccatgtggttttctctgtctgaaacaagcttcccccattcctttctaggctaactcctactcatcctccaaatttcagcacaaagtcacttacagtgggaatgcttccatggccctctattagcagcctctgatttatgctcccacaatagtcggttctgcctctggaccatgttttatcctattgtttttcctccataagagcacagtcataatctgtataactcagtgttgtaactctggcagctagcacaatctcaggttcataaaaagagctcaagaaatatttgttgaatgaccaattagatggcatattcatttcctagggctcctataactaacgctagcgtggtgccttagaacaacagaaatttatcctgtcgtacttctagagggtgggggtctgaaatcaaggtgttgtcagggctgtgcttcctctcagattctacacagaatcttcccttgcttctttggtggcgatcagtcctttgcatgctgtggcttgctgctacatcactctaatctctgcctttgttgtcatatagcattcctcctgcatgtctctctttgcacatggcattttcctcttataaggaaaccaatcacattggattagagcctatcctaatggcctcatcttaacttgattacatctgcaaagactctatttccaaataacgctacattcacagatactggaggttaggactttaacatatcttttggaggaggatacaggtcaataacagattgctaaaccaattaactaattactaattaatataaattatgggtggaaaaagcttccccagatcacgataaaaagctgtgtcgatctaatcaacgtgcttgcttaaataaggcatgtgtataatatatatgcatgcatctgtgtatatatacatatgtacacatgcattaattatgttgtgcaaaaaccccaaaggctatttatcccaaatagaaaatattgtgtcgtttgtctaaagcactttaaagacatctgcctttttcatatgtaaatttcttggatgacaagaaattactgctttgctagcttttaaaacactaaattatgataatccatcaccaaataaactataagcttctatcatttaaaaaatgtaagaactctgaggttagtagtagtttttagttgccattgaaagacggcagtttaacgtcatcgtttattcagatttccaaattaaggagatctctgtggttagacattcctttcgttatcactctccttttcttcaggcctgtcatttgtccattgatgtcttttccttccaaatgattcatgtacacattaggtcttttccctaagcctcatattatgaaaagcaaagctacatgaaaaaaagcaaatgattgctaaattatgtcctaatttctagcattcagcagtgctaaaatgaagcagagaatttcacaaaattctcagataaagtatatttttaccaactaacattgggtaaaagggactgagatagagatttatttttattattattaataactttgaaaatggtgcatttgggaaactacttactaatgttcattggaattggtggtaatactgaggtcaggatttaattccaggcattacccaaaaagtccatgtttgccttgtttcaagcctagagttcttaaaacaatccctgcaaggaaccaggcataaattatctttcagattggtgggcgtaggaatctatactgcgagctaactgtgctgaaatagacattttagaggatgtgaatgtctatctcagacaaaggagattacaggttattaaccaaggcacttttcaaatgccatccctttgggctttcttacttagagtttcagattcatttagccaaataccagccttatcccttccctaattttcctaaatatttgtggctgaatatacttttagctttaggagtgcagaagactttgagggaaagaaggcagggttgaaaaaggatgagtttcaggtcattacattgcttcaaggcagtttgcagcttgcattcatatttttaaagtctaaattagagccctttaacaccaactatcttgggcacacatgtatgtagaagcataccaccatatggcaaaaggcagagttgctaaaactataaataacaaagaggaaggttaattagcaaattaattagctgaattctatacaaggtactaacaataccttaatttccagatacatttgttatcaaaaatgtctaccttaataaagctgtggggacttactaagtgtatttgctgggcatggttcccagttatgaaatattaataccttgaaaaataaaacatgcttatgaaaatgcagttatgctctcattttcagaggaatatgtaagtgaggaataatatagaaatcctaaaacaactggaaattcagactaaaatgaagtagactgtagttttgtcattgcatgttctgctcatactaaagcacctatcctcccactttaccttctttaaactgcagggcagagagttatatttttcatcttcatgttgagtagagaatccatgaaaatctaatacccagttatcactcaagtgtgacaaatagaaaggagcttcagaataggatcttcagttctaccaaatgtctctgcctaattacatcaatatccatgttgatgagtgtacaaacctgtggctaattatattttcacttcttctaagggtaggtacactaatgtgtgatcccacagaaaagggcatgaaagtaaattaaaggtgtgtgccatgtatattaatgcctttgtggttattattgctattgtcttactcccatggatattggaggattgttgataagacacttaaatgttgataaggcacctaatgagtatcctgtgtgataggagtagtacacaatgataatcatttccttctttgtgcattagtattgacatagccactaatcaggaactgtaaactctaaacttgtatctgcagccctcttattaaaaagattcctggatttttttccctaagctagaaacagacagacaaacaaaaacaatgattaaagggcactaaaagatatatttaaaggcagaggtttttttcctatgtgtataagattcaaattaaattcctctttttggctatttggacagttttggcaattgggctgaagccactatgtttttgtcataacaggtcaaggattgcttactcatgtttgagaagcaataatgatatggcaagagagaggtaagggactacaatgggaggcttattaggaattgtgcatgcctctttcatgtgtgttgtctccaagctaaccttgtgaggtacgaattatgacttcttcctgaaggagaaaagcaagttttagattaagtgcctgacattctgatgtcataaaaagactgaaataagcaacattttagcacaacatttgaacagcccttttcttaaggataagctctttgctctacaccatactaatttccaaaaaggtgtgagattgacatatgaaacttgtacgtttatataaatgtgaatgcagcaagccagagaacagaatgttctgtagcccaggcaagaggcagaggaaatacccagtgacagatctacttggccctcgactaaaggggcgctgtaactttaaaatactaataaatatttagcttggctttttctttcctatttgctaagtcctgtcttgattctctggctaaggggtgtaagaaagtggctgtttgtgataaatagttgtgtttgtgtgtgaatgcatggaagaacacatctgagataatatagtgtttactgctttgccattagcacaatgggctgtctttacagaatatgatgtttaaatctatgcaccagtgcactttcaaatagagaattcgcttcctgttttcacttaaaactctctttttattttaattaacgaaaaagcagtttaatcatccatctttgcagctaaggaagttttacaggcttataatactgtcagattctgcggtatataaatgagaaatagacacttttggggaagaaattggccagtcttccttccttccttcctttcttcctttcttctttccttcccactcctcccccctttccccccactctctctctctttcttcctatgaagagactgttctaaaagctaggaagtttcattgatggtgtgtgatttcacaagctggattttatttcagaacacctgtcaaattcagagctgtctgaagcttctccaacatcattaccccagggctcccagttctatgcacatgtttttataatggcaggaaaaagaattcatatacgcatttgtgtgttagaatcagtggtgtgctggtgtaacaatcagctcctaragggtgaggcagggtgggtaggggatgtttagaaaaagtgggtatggagaagtccctgaattctagtttttgccaaattctgtgatgcaaatactcccaccacagccaatttcaaggttatttttcccagttacatttaatcagggccatacaagatgttacaagaaagaaaatgacaggaacccatgtggttcaactgatactcactcaggagctgagatagcatttcatttatgcaattcaaatagctattggtttggataccttagtattgtttcttccaagaaatattttcattctttcctaaagggataataatagacattcatgacctaatttaggagataatcattttttattttatcactcattattaatgcttcatacgaaaactagatttatgaaaaggcccatggattttacatctattatatcatctcctgttggtttgagaatgaaatgtttgttttgctaatatgtttttctgattaagaagtggaggcagcaggctattaaaagtttttctcaaggcagtaaattggtagactagatatcttcaaattaaaaagtagtgatttcttaggcctgttcatagattattcaaaaatgggttaaagcacaggttgaaaatacttttatgggccacaggataatttaagtgattatttttcagccacttttttttggaaaacatatattagctaatgtctgtaactttattaacttaaaaacaaaagtccagataaaagaattttacactctgccaagcagtggtgcccagcttataggtggttggttctgcatcttacattttgttacttgtaaggtctatgaagaaaggactcccttttctgccctgctcactgtcaaaatttcagtctctacagcatgaagactctacatatagaagacactaaaattttttttaaatatatgaatgaagcagttaatttaaggcagcaaagtcacgcctatacattatttctgtaatgtttaattttaagtataattgcttattaagtagataggatgcttagaaactatatttacctggaagtggcttaaaaatttccctatagacaaaaaatataatttgaagtagttcgtcttcaaaataaaggcctccagatggccagatacctttcatgtacatgcatcaattagactgtaccagaagataataaaaagaatcctattgttttaattatctcttttattctccaaggaacccctattcctgccaattcttacagacgttattaaggcattcagttagtttttcattcatttatttaaaaaatatttatcatgccaagtactatttaaatggtggagataccaaagtgaatgagatacatacaaggggccctagttctcaaggagctcacattcatgagaaattaagttcacacatgcaagatataccagatattaataagtattactcagatcattaaactagaatgaggccaggcacagtggctcatggctgtaatcctagtgccttttagaggctaaggtgggaggatagcttgagcccaggagttccaggatacagtgagctatgatcactccactgcactccagcctgggtgatagagtgagaccctgtctctaaagaaacaaacaaacaaaaagtagaaagatttgacctgagaataactagatagctattttagatcaggtattcatgaataaaataacacttaaagtgagatctgaatgacagaaagaaaagccatgcaaaaatcaaggagtagggtgtgcagatttcacagatggcaaatacctaacatggtgatgctaaagtcagcatgaacctccttctgtttcttgaacagaccacaggctggagaagaaaaggtaggaagaaggctggtataagatgagggtgaagagagaaccaaggccagatcatgggagctttatagccaggctaaggtgtttatgtttaattctaaatatagcagaatacattggagaagactatgctgaggaataatgtgacttgacttaaatttttaaaagactacctaactgtgtatggaaaatgaattgcatgggacaaggatggaaactagttgggagatgagttagaagattattataggagtccttgtgggaagtgttggtgactgttggagggtagtggtggtagtgaagatgcataggagtttctgagcttgttttggaggtagaggaggcaagatttgttaaagaactggcttagcagggtgggcacaaaggaaatacagaattaaaggataattccaaaggttccaacctgagcaactaagtagaggctggcatttactaagatgggtgagattgagagaaggggagtatcaggaggcaagattacttgttattttttagccatgtttacatttttttgagatatcttctgagtatctgagaagaaatttcaagtgggcaatttgttggacaagtttttggttcatgggagaaattaggacatggatgcaattttgtgagcctgtaacacacagctagtatttagagctaagggtctatatgaaatcacctaaatagtacttatagatatgaaagagaaggacagagcccaggggtactcttacatttacaggtgagcataaaaaagaaatcaaaagaaactctaaaggatcaaaagcaaagtagaagaaaaccaaacagccatgcgggagtgattgttgagatgttttgaaaaagagaaggttgacagtcatttaggaaggtgaggaatcaaacacagtgcagatgagggtggtgtagggagatcattctctaggtgccctttgcatttttgctcatcttacgatcagagtcactaactctcttggttcaggagttggaagatacagtggcctgttccagagcaaaggcaggttcagttgctgttcaggataatgaagataatgcctcccactgaggcaaagatcaacagagcttactgcccattataaaatattcagattccttaagcgcatggttcctctcctataatacaaacctcttgcaggtactgttgtcacctggcccttttcatatcaccctgtgaggagtggggcccagagaacctacacaaatgcaaacacttcaaccactgctattgtcataaagtccgtggtctctgacccaaagtctcatgtcccctgctagcatccatgaaacagtggcaggtgaactttgaaaacaggataggctaaaatctcagatccttcactactcttcacagatagtaggccattgtgatggtctacttgagctctgttgttgtggtggcatatctttctgtaccgatattcagttggtttgatgcaagcatggtacaggtagatgggtttatgccttagatatttaataagaatgccttaacacatgatcatatgtcttctttcttcactgacaatggcaccccactaatggagtgtgcaaatccaggaagaccagtgtttgaacgttgtggggtaaagtgccgataggtaagcccgcatatttagatatttctaagaggttctaaaatgatgaatactttcctcaatcatttgtcacaaccaaagtctatattcttatgcttagatgtcataattcatattaaagaattgggccttatataacaccttaatattaatagtacttggctaagcacagacgatcaacaacacttaattaatgaaactagttctgaatacattatatactttcagggtatataaggaggtaattacattttacagaggcatatactctatatctggtttattcgattgtgaatcaataaacatgggggttttttttaaaacatgatttctatgatgaatttttaatttaattgtaggaagctcctttaccgctgagtcaccagtgtcttcttgtataatataaagacattatggcctggcatggtggctcatgcctgtagtcccagcactttgggaggccgaggcgggtggatcatttgaggtcacgagttcaagaccagcctggccaacatggcgaaaccctgtctctactaaaaatacaaaaattaggcctggtggtgcatgcctgtagtcctagctacttgggaggttgaggcaggagaattgcttgaacccgagaggccaaggttgcaatgagccgagattgcaccactgtactctagcctgggagacagagtgagaccccatctcaaaagaaaaaaaataaaataaaagacattagccatctggagcagttaagtatatatttttctataaagcaatttaatgtagatgatattttctctctgtgtgtgcacaattgcatgcatatgtcaagtgtcgtgagattccaagtatttgacgatctgcttcttctatagacagttgggtacataaaaggagagccatgtgcaaatccagtctctggttctaggtttatacctcctcttctccacctccgctttccttgataacccctgatgcacacagccagccatcctcatccctcgagatgtggttgatttctctctatttgggtttcaggaaattgtttttcctcccttctgagagtctatgcgctgctgcaggccagtcagtattgattcaattctgggtgaatcctctctcactctttcctaagtgtatattgtatatgtagttcttctgccaaaagcagctttgtattaagattgtattaagatttaagttttcttaaatttgcaagtcacctaaaatatatcctgtgtctgctgggatccttttgatgttgaagcgtcttggagtagacaatagaggattttcatatggtggaagaatgttaggtgtccttgttggagaagagaggaagagtagagaacccctttaaagccctcttactgcctgttccttgcatctcatctctacatatttagcaatcacatctgctgatttggcaaacactaacagcagctacacagcgtcagtgaggacaatagtgagtggatttaaacatcaggggcgatgtaccagtgcaataaatagaatatatcattgtttcactgcggacagaatgtctgtgctctctatgaggatctgcatttaagcccaacacccaaggaaggcaaacatctaaagctcagcatggggtccttcaagcaggggaatacaaacaaagcatttttctcccaaaacacaagttttaggatttcatgtcaaagacatgctgccaatcagaagacagcattcccccttcttagagctggaaatggtaaccaggacacattggtatgcacaattctgctggctcagagcacacgcaagctcctaggctgtgactggcaggaggctcacagcgatttctttttttttgagacagggtctcactctgtcgcccagactggagtgcgcagtggtgcagtcttggctcactgcaacctcagcttcccaggttcaagcaattattctgcctcagcctcccaagtagctgagtttataggcgcccaccaccaagcgcagctaactttcttgtattttttttagtagaaacagggtttcaccatattggccaggctgttttcaatgtttttgaactcctgacctcaagtgatccacccacctcggcctccctaggattataggcatgagccaccatgcccagcaagctcacagcaatttttaatgcaatatgatcagacctaattttggctttttgatttcctcccttaaacctcaggcaggcactttttcaaaagagaaatcaatcagtcaatcaatcagtcaatcaacagtgagtgaatgaatgactaaattgtttgtttttagcatggcataaaataatccttaatattttgacctcaagcaaccattctgaccatatcttcttccatgcgcctttgactgagtacccagatacatgcagagtcaagttttctagatcacagccttgtcctctaattcagtgccttggtatgaaatctttcttcttctatgtcctttttttgccagatgaaatttcagtctttattcaagatcaagtgcaactgtctctttgaggaaagtcctttgaccgccatttctccccttcagaaggcaaacacctgggggagaagatctgcttaaggacctggtaactgacaaagaatggaatgggagcgagaaccgcctagccatcccttctccttgcacagtcatgaaacaaaagttgaaaaggagcctggttttacttgaccagtcataaattaccataaaataaaatgagatattaggaacctttgatctctgaaaaagtaatatgtgttgaaaagaaatatcactgttacatatagacaaataatagaaatatttgaggcatgcatttaaaatgtagaggccacttatagcaggcatattaacatgtgcatttgctttttaagaagtatacacacgtgtacctttagctttgaaagggtaagattcaatgcttgggtgatggatgcactaaagtctcagaagccaccactaaaggacttacccacgtaaccgaaaacaacctgtactccaaaatcaatgaaataaaataaaaaggtaagattcataaatagcaagttgagaatgcatgtttataccatgtagacaatgcatgataaattgttggcaataagacccatgtagctgactttggggatacaaagtagcttctgaaagaggttcctaattagccctgcctgaggtgactgcttaaggtatttatctgtagctggaatgcattgcctcagagacttgaggattcaggagctatgagtttcaaggccacagatgcagtggaatagtaaggcttcttcccctgcctggcacattgacctaactgatgagaggtgccttagggacccagcagctatggccatttatgtctagtccctcactctagaaaggaattgcttgaataccacggtgctggagtttgtagccacaatgctgaaggtcagggcagtccttcatgatgatgcatttctgtcagccatacttgcacatctctttaatgtctgcaatgtcattaagcagtggtgtatcatttttttttaatgcagaaactaaactgatactcaaaacctatgacaatttgaatccttcctgcctatccaaccttagtttttctgctcgataatataaattctccctttcagtcaggtagatagtcttcctgtcttcctgtcattcttggtttctctttgttgctcttgtcttccccacctgctgaaatgcttttcttctttctttcttttttttttttctgagaaaagacctcactctgttgcccatcctggagtgcagtggcataatgacaactcaatgcagtctcaagctcctgggtcaagtgatcatccttcctcagcctactgagtagctgggactacaggcatgtgccaccacatctggctaatttcttcatttttttgtagagactgggtcttgctatgctgcccaagctggtcttgaactcctgggctcaagtgatcttcccacttcagcctccaaaagtgcagggattacagacatgagccacccatgtacctggtttctctcttcttttctaactaatcaagtactttaagtcacaactcagggtgacaacctccacctccattgacttctccagagcatttcatttcctcttatcctttctctgcactttgttagaacttacattctgatttgtactgttgacctttgagcccttaagtttatgcaccttctctctctctctctctcgctcactctctctctctctgtctctgtgtctctctctgtttctgtctctctctttttctctgtcaattattttattctggtatttggtacttatgagaaatcttattagtatcctaaactctctcaaaacaggaaatgtgtattttccttctcatctaattcttaggaaacttcatataggaataaaaaatatgtagtagtggattgtctggtaaatgaataaaagagggatttgaggtcagtgggctgtttcaggacatgaccaaggaatgtggtaccagggcagcaacaagcttgctaaggggcgataaagtagtcattgtatataacagaggaatttgggctcaatgcagatttgccactaactctttggcagtatagaattcactagagaaatattagtaggttagttagtattcctaataaagaactgctaataccttatagagacataagccatgtttctcgtctttcgtttctgaaatgaaattttggccagggaaacattttgcatccctttttgatgtctacaaatgtggcatttgtcagatgtgagatagttaagtgtgtgtgtgtgtgtgtgtgtgtgtatatatatactttatatatgtatatatacatatcctatgtgtgtgggtatatatatatatatatatatatatatatatatatatgaatgatgcatggagagatatctcttcccwtgcatccaaaatattcacaacttttcactaatatctgaataacatttgaaaaattgacaactcttctggctaaagatcagcatacacattcgttccacagagacttgtgccaaaatcttgctcagctcaaggggtactgcacaataaacaataagaaacttttataactccgactaatagaactcattgcttttccagtttgaagataaaggatgtctgcttgctttccatgcctaattttcctgatgctgtaaagctgttcaggaaagttcccactgcaggagttttgctagtaatcttcagctccgtgggaagcctttggactctgttgctatccctgaaagtggctgttcttctccatcagtttcctgggcaagggctcgaaccagctattagtgtctatttgcactgcatgaaaacaaaatttaatgtaaagacgcttatagcttgcctaccctaaaaccccaggagtctcattctgcctgaccctggacattttttgaactgatagagggatgggtatctggtgggtctcttcagtcagctcatctcagcatgttgaaagtccaaatgacccttgcctgaggatggtgaaagtaatttgtatgtgtgtatacataatcctgctttttcactatttccagtcacagattgcagagatagttgactgtgcttgttagtgtgagtgttaataactttgctatgctgatttttagacttcctatgctatatgatctccctgaagagcatgacagagcattgctttggaaaatcaatattcggcgtgattattccttctttcatgtgtaatcaaactttgaagaccaccaataggccaaatctacaagcattaggtttctaaacatattgtttagtcaggagaaattgtgttttctagctgaggtatgccagctactggtatggagaaaatctgcctagcaaattggaaggggccagaagctcaaatgctattgagaaccactcaacaattcttttttcttatacacaggattgaagcacagagcaaaaggaaaatccagctttgggatttgttcccttgaacttacaaatgattcattagaccaatgacattgtgagaatttggtctctgacaaagaaataaatgttttaaaaatagtgctaatacataggtacaaatacagaattatgtcaggcatgtatttttttaaagatagagtccagtgaaaagaatacgtgttagaatatggattaggtttctaaaggtatacttatgtctgccttcgtcttcagaaaacaaagttgtatgtacactttaagaaaggtcttagtgtggtaaacgtgagggcaaaccaaagtcctgttacttcttttgtcatatcattaaagcctccagacggaggtttcttcccattatgtgatgtgcagaatttcagatgtcagtcagcagctgaagtcaactgttggtccaccaggcctctaagctgcagcctctgtcagcttggggacagtgggatccatgtgacttgcctgctactgcccttgattgggcagatcacagagcagatggcctgtgtctagagtacaaggtgttaaggctttttttttggggggggaagaaataattcacatgtgctaatattcctggatgtttcactgataatataatatagaatgtatgaaaaaatcaaagtcaattagaaccagaaatctcctgatactggatgattctatacataaatatcttgcactaacagcaagaataataaaagttgtacaaaaaatgtctgttcttccccagaccatgagctccatggaggcagagaccttatttggttggtttactgcccttccccaatgtttctaccaagctgaacatgtatccagctctcagtgccccattgagttgaaataaattacagtgacataaactatgttcttcatcaaatgctggacaagcacgtttctcaggcaacttctctgggatcaacataagaacagggtgatgaaatgtgagaagcagtgagggcaaggacttgagcctggtgcctacctaaagtttacactccacaagtattccacccaacacttcagataccttctcttctttcaaagtcaacagtttatgcccattgaaaataaatacacacacccactcatgcccataggcatgtgtgtgctaccagaaaatatgtacatgttaggctctttggaagcagtggtagtttggtgagaattgctgcattggctcatcaacacagacctgatcgcactttgatttcatatcttgctatgcagggctcccattatctgcctgccatttgtgtgcatttatgtttagcgtcaatttctcctcccatgaggctataatctgccttgtaaggagctaaaatgggaaaagcagttagaatgatgagtccagttggagcctgctggggaacaagacagtcatcacaggccaatcggcagtggagacagggtggccctttatcacacagaggcatctggagactgagagagacaaagcaacacagctgcaagccgaccatgatctgctggaagcttcttcagtcataaagcaaaggacagtaattctgaatgacaatgtaggaaaacaaaaaagaagaagaaagaaagaaaatggttgagcccagacgatcatttttagttacggatgtcacaaatggtgattgctggtagtgaagtatctgaatctgaagaccagctgtatatagtatgtgtgtttatggaggtgtgtgtgtgtgtgtgtatgtgttggagaagacctgcatgcctagttgtagcactagccagaaattcttgtttcatcgtctagaatgtggccagaggtttgcctaaattctcataagtccattactgttcttctataaatcaggctgcctgttttgcataattcaccaggtaattcacctatcactaggcaaggcagctgccatggagtgcatgcaggaattcccttcattgactcaggctggtaccattctcagcatttttgctgtttatatatttttattttggtctcggttttcctttatctaaaaacgtcaagctgggatggatccttggagatgctcgcttaaacaagttcattacacttaaaatagttttacaagcacaagtgaaaataatgtaataattgcagcagattcttagacctccactggatcctgggttgcctgtttcctttactcagttctagtttctaagtttattgctgggttttgatgtatgtatgtgtgtgttaattttttaatatagaatatgaagtttgagggaaaactattgcccttattcttgtcgatttgttattcgatcttttcttttcctctttgttggtatgtgaggagttgcagagcaaagctgctgagatcttatatttgactgaggtttcacaagctctgcgagatatcctaatcttcagagtgacacctggtttagccaaccacgtggaaaaaactaagggtttagatataaccacattcaaccacagcctttaccttctcccctgtgctttgctgtatctaatgacggcccagaaaggtgcaaagagagacttttcagaaaaagcataaaaacaatcaagaaggaaaaaattgcttggttgttttctgagatacctgaaccagaagcaattgagtatttaggtgtaactttctatgacctattagaatgaatgccattcttatggcttaaatttttttcaagatgaagagggcacttatatagacaaagaatatatttcccataaagatatattagcacaattctaattaatcttaaatctaagtttttgttccccaagtccaatactcagtctagaacatatgcccttttctgtgatgcctgctggccaccatgtatgatcatggtatattgtgcattgtacaaagtgcccagccaagggctgaaatcaactagtgctctacttatgaggaattaatccaggcatggcgctgtgtctaccccagaggatgtgccttttctaattttcgtaaagttactgcaatgggccagccctgaagatatacagataacagaatcctatgacttttagatgacattagccatcatgagagcctgcctctctgtaaatggtgttagggtgtttattatcagcagcattgggaatacagttgttttgatgtgttttctgatgccctgttctaaaattcactacttctctgcaggctttggaaagtgggagtgtaaccactggtcctttgggttctttgtgaagttgtgctaaccataagatgccgcatactctcctagtgaccacagtttttatgggaggtgatgtacagcagcaaaagtctaatgtaaatctcatgttggttcttccagagcaggggcagctagagtctaataatttcttgggaagagtttctgtacctggaaattttagatgtatatcaaggacatgtgagcaaatgggaaatctaattgcccagtgcctctggagcaaagtgtagagacagaaccagaatgttttttaccggcacatttctgtattaaactaagggagggaagctctttaactatatgggaactttttctcattggttcctttaagtgtcttaaaaaaactgatgtcttcctaagagaacttgtgaaaggtggtaaaatgtttaattggaacttaagaataacttcctactgaatagctttgttgatttcactttcctgtggggaaaagatagacattgacaaaactgtttcgatgagaattaatcatagctgtagatttcaaggtatgttatgatactaggtttcatctcctggatcttcctcctctacattaaaatgattagaatgataaactcaaggcatattaatgatccctaatcaatgtaaaaaaattatcatttctcttctttatgctgtatttactgtcagaaatacagacatacatattaggaagatttttcttgaagggaattggcacaaaagggttgagacctttaattaatcaaaaaattgaccattccttgaaccttgattgtttggtatcattaacaaaggacatgagacaacatgttcaagctttataatttgctggaaataatattttctttttttttaaaaaaagcaattttttgttgtaattgttaatcttactatatatttgtctcctgaaaatggtgttatttgccactccttctacgtattaattggtgtaagctcttaagttatataggatagttttaatttctccaaaaagctgcctaaggaaagtaaaacaccataaagaaaagggtatgtacccaagaagtagcaagaaactaaagagaagagattgagatattatcatgagaatttaataagagaattaaatatctagaaaaatgtgtacatacttagaagtagtaaacattaatttcctttcttccatctatagttcacctctagatcactcttttctttctttagatcatcagtatccaagattggaaagagtaaatgagtgttgataaatgggcactctcttgttctgttgatataagcttaagttggggtagcttttctggaggactgcttgacaatatacgtcaaatttatattgtgatgtcctttggccatgcaatttacccttcctggaatgtacgctaagtagataattgaataagtgaaaaaccaaatgtcttcataaggatattcaccatagttttgttgaaaattatttacaaattggaaacaatctaaataaatgtcaatacaggaatagtttaattgcatatagaactgtacatacaatgtaatcctatgcagtcactaaaaatgaaaatgtataggtgtattgattgccctgggcaattaccataacgtataaatgaatgagtaaaagtatcacagaataatactcttccctcctaagtaaatcctcaccaataaatcctattatacaaggcaaaacctgtatattatccctatcccctaattttcatcatctctcatatctaatccaccatgatgtctttttcattcctaagtgtgtttcagatcatccacttccctctaactctatcactgtcttctggtccaagcttggtattcaattaatacttgttaaatggattctgaatatgattccattcataacagcacacctatccacgtacgtatgtgaagacacaggtgcctagagaggtgttcactgaactactaatggtggtttcctcttctgtggtagaattcagcattatctttatttttttatttgaatttctcttgttgtttgaaatatttttaaataataatgtgtaatttacccctctccaaaaataaaacttataaaatggggatgataactattattctacctttctcactggataaacatagtggtcaaataaacaaatactcgtgaaagtcttttataatgtgaaaacaaaggtttttttgttattatgtgcaataataataataataactatagatactaaaatttgttgaatatatttcctcagtattttgagtgtcttaactcatttaaatctcacaataagcctatgatactataaatatacccatttcaaatatgaggaaactgaagcagagacagacgaaataatttatccaggtagacacagccagtagagctgaggcaggatttgaccccacacaatcaggccctaggacccaagccctaaccactgtgccaaaatcataatacctgcaggaagtggcaaatgttgaacttagctccatatatcagactcttgccactgtgaagcccttacagataatttcttttcttttttgagacggagtctagctctgttgctcaggctggagtgcagtggcgcgatctcggctcactgcaagctctgcctcccagtttcacaccatactcctgcctcagcctccctagtagctgggactacagccgcccaccaccacgcccggctaattttttatactacctcagttaatttagaaagattttcaggcactgatgaatgattttgggagtaatcccaagccaaatgacctctgttggaagtaatttaatagatgtgtttaaatattagaggtgggtgagatggtgaagaattaacatttgaggaacatttggtatcctctgggcaatatgtagacaccctttcaataaatcctcacaacaccccagtaagttatgtgttatttgtttctattgtaagttgcagtcatagataaggaaactcagatatgtattaagtcatttgctcaggtctttacagctattaagttgcagagttgggagcccatctaaactcctaagatcagggtctggatcacctctattattttacattgggcatctatcatccaggacctatgtgctgcaggaacgtaattaagaatgactttgacaagataaatatttggggacatgaagcctgatcacagagtctaccagttatgtggacttgggcaagcaacaccatgaacctcacttttttcattctcaaagtgggactaatgaaatttttcctgcttctccaaaagataattttagtcactctgttggtgagttttgcaaaaacattgtagtataagccttcacaaggaattacagagaagaagataagtcttagcattcaagaagcctggactgtacctgtctcaaaattattttatgctaaatgcagacaattttctctatttggagtttctttcccatcttagttggcctcttctcagttttctgaatgaagcgtgcaccctcggatgtctggcctttactcctgcatgtcttccggtctggaataccttcccctccctcaggaacttaaccagcttcaacatgcagccttcctgaacactccaacatgaagggatgcccttctgttctaaatgtccactgcactgaacaaatcatttaatacaaatttctctgtagtttatacagaggatttgtgtttatgggcttatatgttttctttaaaaataagttataaagtttttgatgctagagcattcttttgtatccccaggagacactcagaatatatttgttgattgttttgattttaaagaaaaaggcggaagaatgaggtaaaatggccactatctgtcaggaacttcatataattatctctgcccagaaataaattaaaatagttttcttcagccagttgcaatagcttatagaaaaaaattaccttccctagatgtcagtgtcccaatttggaaaacagagtttggtcatatattttgtccgctgttgtacaacctttagaaacataaaattcaagaggaatactaaataaaaggatcaatcaatactgagttcagctttaaaattatttcatctaataatgctggttttcttggcagcactagcaagggctagaattttttaaaaatcatccttatatatgtattgattgaatttattaaaatgctttattaccatatccatttgcttataagaaggcaccctgatgtgtcctatatgagtttcaaaacacaattaaataaaaccatgcagagcaacaaacactacgtagcatttacaaactgcatttgtattcatttttatgtacatgaagggaaaaaaaacccaaaaggttgaaagccttctggagtgataaatgccacaatttagtggaaaatacacattgtaatttgagaacatctcccactaagagtcagtgtagctacagggacaagaagcctggtgctaaattgtctgaacattgatgtcccttcaaaattcatatgttggatcctagtacccagtgtgatataatcaagagataaggtctttggggaactgattaagtcatgaggggttctccatatgcatgaatgggttcatgctcttataaaagaggttgaagagagcaccctagggcctcttgcccttctgcttctgccatgtgagggcgtagcaagaggcactctttatgaagcagagtgagcccttgccagacactgaatgtgctggcgccttaatcttggacgttccagcctccagactgtgataattaaatttattttatttctaaatgactcagtctaagaagttttgttatagcagcccaaacagactaagacccctggcccacaggctcctgagcatctcagtgcctttgaggctataaaggacctcgaccttcactttcagcacatgttcaagtaaaagagaaaaatgtgtgtaaagaagtgcccatacccaataaacatacccatatttattgcaaattatcctctaaactgtttcattgtggtcaaaacccaagttataaatttttagtgtccttttaagagttcagtatttgtcaacctacggtcaacatttgcatcaacaaagaaggtaagatatgttgtgttatctttgtcatttttcagctgtcaactaggataggggccagaaatagcaaaactgtaaacttgaaattgtttcaggaagaagtgtaatagctaaggggtgtctatgaaatggaatgtatatcaatatgaggtaagacagctggtaaaaaataaaaaattagcaggaggggcaccggattcatgtaccagggaaaataatgtcatgttcattgcccagagagattcccaggaattagagattgagaaatattatttcttgacatgtctagaggctacgtggatagaagttctggaaaatgtttgagataaaggccaataaaaagcaaaaggacctgaggattctgtttattcactgaacagagaagctaaaaattgggctctcattttggacaaaaataaaagccatagtaataagtaaaataaaataacctaccaggtagcagagctcttagcaaaggattctgcaagcaaaaggcaggtgtgaattgggaaagtgagtctgggattgaggtgaggtggggttaggtgtagaacagggctatgaaggtcagggcagtggaaggtttgattctggaaagcatggcttcaagggaaaacttgagtggtgaacgggaaaatctgtgaggatcggaaatgtaagtctctatacttgctggggaaatgagcaagaaatgaaagggagagagccagatgacgcagctggaagcagaaatctgagcagggggaacctggcaacagagaggaggagctggaagaacaggggcagatcagatctagagccaagctgtattctctggccccatactttaatattctacctatgaggcgcagtgcctttgggtgttgttcataaaattccagtgttgaaaagggtttcagacattgtccgtgaagctcctctatccatcaagccctttgcaatatttacagtaaggaaagtgggagcgcttcagaaagagagagagagaaaaatgaaaattcctagccccatctagacatgccttatcagtgagttaggcgaagtgcacaaaatttaaaagtaagattctagttgtttgtattttagctattcacgttgcatcacaagagctccacaactggatttaaataattgtttctgccttagcaatcttaagtgtgcatgtattgttcagctattcctttaggggaaagattgctagatgggaataaaatggaaatgctgttttctaaaagttgtggtcttcatagggagatagctcttcacttcgtgtgttagtgatgaacatttgcaagctgtagagctgtagagaacactttgtggttcttctatttgaagaaaccctgatggctttgtcacatattccaagtttaacttttatttttaaagagtttatacatcatatttgaaaaagactcaaacatgtctagagttatatgttagacactaaacatacttgaaaaagatttaaaaccttggttttagtcatctgtaagtactctattttaaggacaactaattaatacttataactcagataattcaggagacgatcaatgattatgaaataacttcctatgacatacttttaaatagtaaatgccttcactgcatgtaattcacacatcaatatatactaaactatttccattaatatagccagtctccaatttacaggaagacattatgtttcacaagttgattttaagtgaattttttgtaatatagaaagaattgtcccaaagagtgactgctgaactggttaaatccacaaaaaaaagcatcacatgaattcatctactaggcaaatttgctcatccactttcaagtcaaaaaaaagttttaaattagataaaaacctgtgtatcccctttcttagtaaatttgcctgctgtgataaatatacacgtgcacacaaaaataggcatgcatttttaagaggagtagaaacccatttgaacttgtccaggaactcaagtttagaggctcaaatgtagagaatactaataaccacctataataattcttttggagaaggcatactgtattatgcctagtgcttaataggacaggggatttttcatctctcatgtgcctgggaatgagagccaggggcttcccccaattctaaaaaaattagcaattcagcagaatctacagtggggccaaattgtggctgggatttgggggatttcatcaaagtgggtcagaggtagaggtggaagagaagcagaaggccggtgggagtaggatacagtacaggggcgagcttccagctggctccatcagttgaggaagaagaagcaatcccaggaggtccatactcttgatattttatccctcctctcactaaggacagctatgccctttgtgatctgccctagactgactttttaatacagagaatgaaggccagtacagaaagcaaggagagaaagaagagaaatagatgctaagttgtccccttgaggaagaatgagggaaaatggagttcctgccaccctagtctattagctgacattgttactcctaattcaaggtaattattggtatgcaaagaaagtatgtattaactatatgtcaaccagtaactccctgaaatccacttgatgatagaaaattagtctatggccatatcactgtgaatgcaccaaatctcatctgatagcaaaatattgcatacatttcttctagaaactaagaattccaatgaaaagctatgaaagaatcctacttaggtctgaatttccatacattcctggtatctcagagggtggcaaggttagaaaacttgagaatctgtgggcacactagggatgaagtgatagtattctttgttggatatcaaaagaaatctaagcaggagaaccaaaatccattggtggaaccaaaaaaccattggtggtctgaaaagttaggtgggagaattgaatagcttagttctagggatcaagtaaccaccctgactattgagcttcccgataagacaacatgatggaaactacatggtttcatccaggtgctgggaacaagtcctactgaacattggcttttggacaaataacaggcagattctttggtgaagctttgttcatctgaaactcttccctgtcctctcttctccacttcatttttctgatgaggagaatggaagtttgtataaactagagtgctcaagcagcaggcagtggaagaggcaagacctccaagtagatctgcaagctctgaaccaagtgacctatctctargccatawtgaggaaggccaatgcarktttgcgatctctctacctcttcatttttccttttcctcctccccttccccttttgctctccccctcttcctctcaagagagtaatgtgctagtagtacctgatggtaccccagtgcttcctgccttcctcccttccacttcctgccttcctttctcccacttcctgccttcctcccttccacttcctgccttccccagtcccacttcctctcttccttcctggcaccccccagcactcccttccctccttctgttctccagtaccttcctttcttttcctttgcccttctctcttcctccttctctctttattttccttccttccttcctctgcaaggccttcttactagtttccacccattttcctatgtaaagcgattttgaattctagccatctgttaatacaaggcagtgaaaaatgttgaagtcacatcaaattccacttgctctgccagttaaaaatacagatgcttcctgttttatgctttcctctcactttctctagagtttaaacatgaaaatatgttccatgataaaaaccagcacatattccctttcatcaggaaacatattccaaacaatgaaaggaaggggagggggattattttcacaagtccagcaaggatacttggatgttgggggaatcatttgtagaaccataatttcacagagcaagaacataattattcacaactatcacattttatagatgaagaaactgagatcgcagggaattgttataattgttctcatatgtgctgcatatcgacttgccaaaattcacatcagcttaaattttcacccaacatgcctggtcctcaattgttccacaatactttttgctatccgctgatttcagaaagggttcttttggctactgggagaggccaaatcactaagcaatggataattaacctgaaactcagtaaatgcactggagtgaaaaaaaaatgtgagactaagagtcaagacacctgggttctagtcacaaatctgttactaactacccatcccaactcatagcaaaaatttttattaatactcttgctccacaaagagactagatcaaatggtctctaaatttactttcaactctttgaatcttgagttttcttccttcaattttctgctgactcagagcgtatagccttggccaagttatttactgccataaatctcattttttttccaagatgaaagggagaataacacattcccctattttcccagcatatatatatatacactatataatcttgcattaaattgactatctttagaaatcacattaaatcctttctatctatagactttggattagtcactaaagctagaataagacatgggccatatcattaggcaatgtctctggctgtagttgtattatcaaacactgcattgacgcttgttcatccttgcttccatcatacctttttatgtaagctgttctaattcttacatgactataacatggagcactgtatgtcaccatatctcttcctctcattgaatctgatcgtattctaatatctcctatctcaatgcctagttcttcacccattttaccaatgcaatatagaaactttcttactgcctttttatttcttacttttcttttgaataattcaccaagttattattgattttgtctgcctgatgtctttcaaatttatccacttttctctcttccatgatatcctaatctaagctaccatcacccctcaactgaactacagcagtcaaaagggttatttccacacagcagtcaaaaggattgtttcaggtgctaaatttggcaatgtcaccccactgaatggctttcttctggtcttaaagacccgattccagaacaaaacttacatggtaggcagctcctggcccttgactgtgtttctagtgtcatagtacatgctcctgaccttttgccctctttgagttcctcctcctcactatcctttcctggagattcaggtttggcagttccccggggttagaatgctcctccatgatttacctagttgctgcttattcttctggttttgtactgatggtcatgttctcagagcagccttctcagcctccctgggtcagttccctccatcatgcaccatcattgtgccttgtatccttgctgttattatacttatcagagtcgtaattttacatttgctcatgtcatactttttagattatgctttgctttcttctccttcaccagagtgtaaactctatgatactatgtctatttttatgtcaccattgtaattccagtgcctggcataatatctaatgcatagaaggtgcaggctaaaattctattgaataaataatgaatgaaaagaaagaatagaagtgcctgagttcaggccctgtatccccattccctcatatatgtggttggaaccatagaaggcaaaatttggtgttaaaagaataaagctggcaagcactgatgtgcctaacaggataggaagttcagaattcttttttaaaagtgttcaagggcccaggagtgcctggctaacataatgagacccagtctctacaaacatttaaaaattacacaggcatggtggcatgggcctgtattctccgctactctggaggctgaggtgagaggactgcatgagcctaggaggctgaaggcttcagtgagctgtgatcacaccactgtagtccagcctggtcaacagagtgagaccctatctcttaaaaaaagttctaggatattggagttgataatgtttgtaaagatcaacgctaacattgcctccaaccaagtctcaatatgctccaaaaagaaatacttcaaattaaaactcgtgtgtgtgtgtgtgtgtgtgtgtgtgtgtgtgtgtgtgtgtaaggagaggtggctcatacctgtaatcccagcactttgggaagccaaggcgggcggatcacttgaagtcaggagttcaagaccagctggccaacatggtgaagctccgtctctactaaaaatacaaaaattagcgtgctggcatgcacctgtagtcccagctactcgggaggctgaggcatgagaatcacttgaacctgggaggcagaggttgcagtgagctgagatggtgccaccgcacttcagaaacagagtgagactctgtctcaaaaaaaaaaaaaaaaaaaaaggccgggcatggcggctcacgcctgtaatcgcagtattttgggaggccgaggcgggcggatcacaatgtcaggagtcccagaccagcctggccaacatggtgaaaccctgtctctactaaaaatacaaaattagccgggcgtggtggtacatgcctgtaatcgcagctactcggtaggctgaggcaggagaatcgcttgaacctggaaggtggaggttgcagtaagcagagattgtgccattgcataatggagtgaaactccatctcaaaatatatatatttttatatatttttaaatatatgtttataaatatataaatatttttatatacatatctatatatagagagaataaatatgtatccacagagagagggagagagataccaagacaaacttataattgctataaattcaaataagagagaagtcagtaaaacctagagtaactaggaaatactccctagaggccaaatttgacctgtgctttgaaaggtaattacaattgggacaggaaacggcacggcttctttctcaaagattgattattctgactattctccattagctcttccttatacactttccactttcccaaactctgtcccgggatgctgacatgaaccacgtcaacaggactccctcacatcctgtcttcaagtagcatttgcccagagagaggcctcaggcaggaggttgtaggatggaaggagagatttgcaggcattcatttccctgctccctccctgcctggctgcagtgggtagtagctaattcctcttctgaaggccacagctcctggtggatgcccccttctcacttacaactgagcttctcagtgggttaccccttcacaactagggttggtcatggctttctgatgctgtgatcacccagggtacttttaaactctctacttatccgtctggggtgccatgtgttatttgctaagaatgaggtaataggaattttttaaaaaaagattaaaataatactatcagcctgtcaatggggattcctcccacccccaaaaatagagttgttcgtttctctttgtttggtttacatgatatatatatatatatatatatatcatgtatatgtatatgatttacctcaaaacagatcacaaagctgaggtcacttgaaactgactattacaagctagctggtagaattaaacttgtttccctaagtaaaatagaaaaatttggccaagagataagaaaatagctgcccctcaccaccacaaacacatacatacacactatactgaatggatcttcatagagagtaagttaataagaggccagcccctacctctgcttccctccccagggacatacatataaatagttcagttatgtctgacttaatagatttgggaaggaggaaacgtgagaggctagtccttctgaagggttgggaggtaagggtgagggaagggaggggagcaaaattacggtactgggatttggacccagataaaagctgctttgtcacatcatcccgatgtaaaatccgtgcatctgagagatagcccctgagccaccacacaggctcctcccaccagagtctgtctggcaggggtcagtgctgcctcgctgtggattagagggagtcatcgacatgtcatctgccatcaaccacacttattgtgaggaaaagaatgccccatacacatagaggccacccttgggatggacttttgagttgactaaagagtaaaaatcacaatggatcatccactagtcagcattattacctttactaacaaaaccagtagcttagccacgatcgtataaaacaataaatgttggttaatttctaaagtacattgattgttttagtttttgttttaagaaaaaggcttggccgggcgcggtggctcacgcctgtaatcccagcactttgggaggccgaggcgggtggatcatgaggtcaggagatcgagaccatcctggctaacaaggtgaaaccccgtctctactaaaaatacaaaaaattagccgggcgcggtggcgggcgcctgtagtcccagctactctggaggctgaggcaggagaatggcgtgaacccaggaagcggtgcttgcagtgagccgagattgcgccactgcagtccgcagtccggcctgggcgacagagcgagactccgtctcaaaaaaaaaaaaaaaaaagaaaaaggctttatgtggctgttgggaataggattatttcctctaacatttatcccagtatttttaaaataaagaaacatttggtcgatgaaaagtatagaatatttgtggtaattataataagtgaatacattacataatgtcctttgtgaaaaaggcttacattattataatgggaaggaggtaaattaatctgagtagtattagtataatagtcttagtaattataatggaatgaatcaccctatattataattatgattcaaataatatatatttttagagatcaaccgtttcatgatgtgctggaatgggatgtggtaataggagagcagtgattttggctaacacattaggtattctgagtcaatttggcacaacagcagaaattattttctctattgtcttattgagaagaaacgtcctaagaaggatcttggggaaaataaataagtatgtgagtctgacataggaagagagggtttcttcccctgcaaggcaccttgtgaaagcctagtggggagaaatagtgggatgatgaaggatggggcaggttacttctggaagcaaaattcagatcccgagtgcaggtgttgttcaggcctctgtgccccactgtaagtgtgctggcttcattgaaagggatgagaataaggcagacacgttcaaatatgcagagtgagggaaaatacaaagagcatatttgatattggttgaatgattgagaatatttgatatttgatattgattgataattgatgagcacttactgtgtgactaggaactgaactaaatgctgccccagagatcattcttatttatgctcacaccactcatgaagcaaaccattgttgttattttcattcttcagatgaggaaactgacagtcagtgatgctaagaaacttgctcaaggtcactacagtagttattgtgggcctggggtttgaattcagcctaactccagagtctatgaccttaaccattaagtgaaataagtgaacatcttcatgttcaggacatgtgatgtgtgtgcacacgcatgtgtgtgtgtacaaaataaaatatttgaagccaacaggatcctaagtctgggtgggtcctaatgccagagtgcttagggacacttcctttttaagcaagatagtttgacattgtcagcttttaattgtaatttaatttcttgtgtgaacattattaaaatgtattaaaaccagatcaaaacatccaagacttttatccccctgatttttatagaagccctctgcttacaagcacttaaagagagatgaatccttatttttcctctggtaagtgatttctaaattcccgtagaaaagcctttaaaaagaaaactcaactagctgcatttatggacttgaatacctacactctactaaaattattgccttttcttaatgatgttcctgactcatcctgaaaattgatcatatatgtataaggtgatgctcactttacaggtggagaatgttgtagccacaagtaatgaagactaatatatagatatttaaatccacattttgtccagaattctcaagcagggagttctaacctagccccacccctcattccctcattaagcattgttttcttagaaaggattaaaactggtaatatatctgtaatcaattagctgacatgacttaaaattgataagtcatttgatgaattctcatctcaaattccgaatgaataaacaatgagaaatgggaaagcctttggcagagagagactcattgaatcagttaattaaggaaagagaaagagccagagtacaagctatcaatatcacctacatgggtcaagaactcatccttatgtgtgtaataatagagctactcataaacctgaaatgatacaattaattacggaagttatagaatattggagcatcctcgggtgaaaaataattgtgtctatattataaaagtatgcaacataacacattttatctgcatttaacattttgttggtgtttcatgcaaatgaaaaaaaaaaaacactgtttttatgatttagccaaaccatgctaactctagtaacaaccctcccaatctcagtgttttaatgcaacaaacagttgtatcttgttggtataaattccactgcattgttcttggttgggttgttccttaaagaggatactcaggaatccattctcttcctatactgttccagaggaagatggctcctccattttcaatacgtggcttcaaggtcacgctgacgttgttcagacagtgttctgttggaagagtgagagaaaaaagcatgtacatacaattccttccaacacacatacacttaactgctttggtttgaaagtgacataaaccttctgctcacattccattggccagaattcctcacacagtccccacctggcttagtgctcaggaagaggaaatagatttgatgatcatctaggcaatgtctgtgatgagattggttcaaaaaatgtaccagtaaaaataaaaataatcctgttcattacattccagaaaatgaactgattaaagacaaatatgtatgcatcacttttctctttacgtagtgaagcaatgtgaaaaacatattaattgagctattcatggcaagacttctctttataaacttcatacatctgtcactaaattgatatgaaagaaatatttgatctcagaaagaattttatctatcatgatggaatgctggcagccaaatgtatacctaaaaattgctgaaatattggagtaaaaaggaatagttagatcgatcatcttaattttgtgaaagcatgcgtacatttttcaccttggattcagttgtgttggcattttataggcacagttataaatttgcctaaaatacagaatggcattacaacaaaactcagactcatggtgtaatcattgtttttttcaaactaaaaacaaagaatgaaaaataaaaacctctaagaacaaaattactccatttaattaaattaaacagacaaaacttggaggcatagtagagatggcaaggaaaggcctcagaccccttacccccatccaggggaaatatttgccagccactcctatcttcagcaaaacttgagttatgatgtaaactcaagactcttaaatttgtgattaatcctgggtgtcttgaaaattggagagtgggttagcaaattcatagttccccaaatttgtgctatctactgctgttttcttgtggattataagcttgaaggaaatgtgctgcctagagatatgagctgtgtgtaattactcccacctgctgggtaaaatctttattacatgggcattagacttcattcccatcgaggggtgaggaggggtgcaatatgaaccaaccacaccacaaggcttgtgaacatccttcctctatggtgtctcctgacacttctttccagcttccaaatgtgatacaactttgactggaaactgtgaaccaatgtgtatccaatgaaccaagggagatttagctccttaaaagaaaattaaatgtagaaagatgtggaaggatcaatgaatcatatttatccaataagtggttcaacaattacaagagcgagacaggaagggaacccttccaggcagagtggtcctcagctctggttttccagcctagagacccatgtggcaggaacttggccttcatcattgaataccctgcatacacccttcctcaagcctcctttgtatgtgtgagagcactgacttcagaaacagaaatgagtttccagccctcaagggaactgtttgctaaagattggcaggagcccacaagactacgacacagtctttgatgagctggctctccaagtgtgggcagacttttgtttctaagttattgggaggctttctgtgggtataaaacctgcaaaaaacacaagcatcaatgttgccatattaataactgctttcatccttggcaagaagaaaaagaacgtggggaaaagagtcaggcgcaaacatggtttgagttttattgtcttttacttgctcactgcctacacctcccaccagtagctttggaaagagagtttcagaaatgttatcttatgttttttatccctaagaatggggtcatagtcttcaatttatgcctaaagtgtttaactactccttcttaatttactcgctctgcccaggaagaaaacagacataacttgcaaaggtggaaacactggtacgttaggaatatcattcattttcggattcttggcccttgagtttcactgttacttaattgacaaagctgagctgtttcatttcacgctaggaagtctttggttaaattgcaggcttgggtttctgtcctttggcagtggaagtaaagagaaatcagaagcaatgtagcatttatgaaccactggctcctctaactgcctctgtggcttcaaatcctgatgatgtcaattgtggtttgtgtatatgtacgtgtgtgaatgtgtacacacatgtgagtgcgtgaacattcgattcatttctcatttttgttctctctcttttcccctcacctccggaccttttcatccttctttatgttctgttgccttcatctcttagtttttctattctatgccccttttgtttctactcttttcatctgacctattattatgtcatcagctataagcaccatggaaaacactagtttcatcatctccatctgaaagaaaaaaaaaaactcaacaagggagaagctgaatatatctgtcttcagtatctatctttgaatttggaatgcttcctgccaagaaaattatattctgaaactccttagatcttgcagtcttcatgaagcacaccagccaatagctgcctcctgacatcagctcagatatctggttgacttttgctgctagctcttccagccaatgaaagtagataccttaggccagtgttcccagacatttaggttttatgggataataaaatctccaggagcaaaatgaagaggctgatatattgccttctctttaaattttaacacttttgaaaaactgccatctacacactaccgctttttacattttaacacttttttaaaactaccatccattgtcatcattattccataaaaagaggtattttaggaaggatactcacaacataagttggataaatttagcaattaaaaaagcactgctttacttttatcttctcctttaatcaaagatgggatatgaatatcaaccagcattgatccaattttaggcccttagttccaataaaattgttccttttcccatataaatggttatgcctttgggccaattgctctgtctctcagaggttattatatcctgttgcctctatattgaggattgctgtttcatctttggagttacaatgtcccaaagggatcactgatacattcttagctccagtatataaatagaggcactaagaaataaaatgagagggttttgacacctctccctctcccccaccccccaacacacacaaacaagtaaatgggttagcttttatttctacaattgcacagcatatttagtgagagagggaagttggaggtgggtatcacacatgtaagatattgcccttattttttttttttttcagagacagtatctcattctgttgcacaggctgaagtgcagtgcctcgaacatagttcactgcagccttgaactcctgggctcaaacaatcttcctacctcagccttctgagtaactgggactacaggcatatggccaccatgcccagataactttttaaaaacatttttgtagagatagagtctcactatgtttaccaggctggtgtcaaactgctggcctttagtgatcctcccattttgccctcccaaagtgctgggattacaggtatgagccactgcacctgtcctggcccttattattgagtagattgtagtctaatgaaaacatatgagtataataaacaaaagaaaaaagaaaacatatttagccaattcatagcaaaaggcagacagaagtagatgctgaatagagaaacaagactgttagagggcagagaaaggagtaattcattttgctggaagaatcaaggaagcaatcacaaaggtttaatgtgtaattctgaatttatgtgattgctatataatcattctgtttcatggctgcagtgtaagctgtgtgagggcattgtttgtatcagatgtctgaacctctttatctcatcccttatcatagtgtctggtatctagtctataacccataatatctcctgaataactgaatgggtgcctacaatgataagtggtgtgaaagataccaagaaaatcaagtatcattcattgccccgaaagcacctgtgagcacataggtttgcaaacatgccacatgtgttcggtcagcccattgcttgtgtacatgatcatagatggtcatagggatttacttcattctgaaatggaataatttcatcctcaccctgctttaccttaggtaaagattttgatgccatttttattaagacatttacttggaagtaaatgtcatgctgtgaagagccattatagacaaatattgtagccacttgccaagtaatgacttatgctgggaagttgcttaaaaggctgattttattcattttatttgctatacccttgtgctacttagagaagggtagagaatgagagaggagcaatatgttttgttctcttttttttcataaatcagtaattatttgcagagtgttttgtgtaaagtgctcagctcacaactggaaatagaatcctgggttagacagtggccatagtgatatttacatatctccagcttgtagtttgccaattgaaatgcagacatatgcggaaattgcctcattgtcattccttgtttttgtaatattatccttggctctacggattcattttttttctccttctactgtcaacactgttttagcagtgagttatattatccggtgacatcagagaagcaaagctacatgtgtcagcttggcaggaattgtccacttacagcaaatttgtgacaagttgtatttttctaccattttcacctggagtgacgaagaatctacagttgagggagacaacatggacctcccctgatggtaacagtgctatgtccaattgagctgctgttgcttcagtaccaaagaggaaggagctggtgatctttgaataatccttcccctatgaaaagtaggaatgtatccccagagttcattgtctgtatctgtaggtaatggaggcttaactggcattaaaatcatagccagtttcagacccattaagtttaatggtttttgtaatgataggctgcaactgatggaataaccaaaagaacaattcatggactgtttatggaagaataccttcaccattcaaaatggacattaaactatggctggtttcattgcaaggcaaaagttccctctttatcttctagttaggtccatgtgcagcccaggaggtatgtaaaagctatactttaggagaaaagttgacttgaagcttttaagctaatgagtttgaacttggcatgttttctattatcattgtctttaatcagtggtgttatataataaggagctaataaattaatctaagtgtaagtcaaattaatataagttaaagtcaaaatccagctaggcaaagccagataggcatattaaaatggcagcccctaccccaattccttgataatccattaaaagtagaaagttttggttaggaagccacctcctgttacgtaaatcagaatgtaagagccatgagattagggattttcatttgttttatccacttttatatcctcagtgtctagaaaaatgcttagcatattgcaggcactctgcaaatattgaacatacggggttgatgaacatataacccattttggttgatgtagttttatttcttaagaggtaaaaattctttcagaaaaagaaaagtaatcatttctacaaaataaccctccactggttgatattcttcccagatctacctttcttcacacagatctttttttaagagaaaaccacagggatatgtggctggtgcaatcaatgataggtttgggatatgataaaatgtaggaaatggctaaatgggagagtacatgatttataaaatagaatttaaaataacagccctcaacagcagatctttgccagcagcacatgatgggaaaatataaaccccattctggggatggcatctggtacagattgagaaataaattgggcagcgaaacagaatgtgtcttcagtggtccttaagatcaaaccaccaatgataagcatggatcattggagcctccaccttgctctttttgaaacagctaaaatcagcaagggaatgaaaaggaaatggctttatcatctgtgagcagcttgcccctccctctggagatccaaatctccaaacatgcattttgatatactttgggagttctctttatctagtaatttcatttaggggaaaaaaatatagctctccctgcccacatcccacattgttacatcactgattcctcaccatgctaacacattcaataatctgacgtgcaactcaactagaagagcaatcacagccagtgatgggccggcatcatggagagtaaagacaaatggaaacaataataactgtggaagaagcagatctcaaatgggaaactcaatcccagtgatcagggaaaactccaaaggaaggatatgagttcaaaaaaatcaattcaacaaaaacttattgtctgtctaccatgtatcaggcatggggatatattactggtcaacacaatgtgctttgctgcctggtgcctgtgttctgatatctggtgtgcatgttctcaatggtattgcaagttgcattgggctagaatcatgaagtattatcaggggatttacttgaaattaaattagtcccattcttgtggaaatctggagctggcatatgcatggaagtgaaggtcttgttgctggttgaatttagtgccctctgcaatgaaagccaaatcccaactttagtctgtgactggggggccttctacaaagagaatgaattttaacaattaaccaacaatctaaattcttggaaagtgaaagtttctaaaacataaaatccatgaagacagaattagaaaatcaatgtgtcctttttggaggaagaggaaagccgctggctgaccacgtcactttcatgtttctactcaaatcttatcaacaaggcctttgttgaccattcatccccttcctaggcccccttatttctatgtctgtcttgtatcatctgacacattgtaaatgtccttatttatttgcttactgtctgtctcttcactctgaaatataaattccatcatgtcagggactttttcttcatcttccccaaatgatgtttgaagcctcccatctaatgctgagaggtatttccctagtagccctgtcatcactttcctaccactgtccctgttgccacataatttaagattccctgtggccaatgctgatgtcattatcatggacgtccttaggaaacgaaaataatttaagcttctaaaatgggcaaattcgatgtagagttgatgggtacatcacacacccatctagaaaagagcatctcaggttggtacctgaaacttggtagactccaccccaagtcacatggccaactgatgtgttacttcttagacatcctgctttctctgtccataggcctggttgggtggtctttttcagatactaaatcatggtacaattggttttcataaaactagtactctaattctacttttccagtagccttgagtaaaggaatgttgaaaacttgtagtgatgaaacgtgtaggatttgcgatttgtcggagtagggacaaaactatttgagaacatagtccagctgaccaaaagaaaataagttctcatattactaataacttttagggatccaataggctcaagaattctgaggttgggtttgacagtgattagtgtaaattaagtagaagtagttaagaaagtggctgaaattgaaggatcggttgtggttagtaaatatggaggattgaaacacaatgcaaacttgataattgataaccttcatttaattctaactaaaagcccactttctggtccaaagttggaactaagaatgaattctttttactctgagaggatatttacaaagaaaacacaaacacacaaactatgggtaacacaaaagcaaactagaatgatttatcttattattctgttatgggttgaattatttcctcaaaaaatatatgcttgtcttaaccccagtgctgctgaatgtgactttatttggaaatagagtctttggaggggaattagtaaagatgaggttatactcaagtaaagtaggtccttaatccaatacaactggtgttcttattgaaagagaaaagacaacgtaaagacatagacacacaggaagaacaccatgtgaagacaggcagtggtcagaattatgtatctacaagccaaggaatgcctgaggttaccagaagctggaagaggcaaggatcccctccagagcccttagaggaagcagggccctgacaacactgtgatttcagacttctctcctctagaaccattagacaataattttctgttgtttgaagccaccaaatctgtgatactctgttacacaaatcctaggaatttgatacaccttcctagacccaagtggggaagaaaagggagaaacaggtttagaggtggagtaaaagataacagcttctcacaacttgaggcaagatgcgtatgctgatggcagagaaaggagttggcattttctgaaagcctgtcagatcccctgctttgtctgggaaggggaggaatatccacagcgtcttagcaggtgaaatgcagcagcgaagaccaggtgcctgtattgttgcctctggttgtgcagatgaagagtcattaggctgacctcatctatggacccaactggaattagccctgactctagagccactggatgttcaggcaaaactgaccctaaaattctttttaaatgcattgcttaagccaagcattctcttattcaaaatcaagctgctgcattttcatgtagcatgaaatgcaattttctatttaaggtgttcaactaacttagggataggttgatggccaaacaaagaaggtttcattaagatggaaatgatttggagtatctagtctccaaagtgattgctctagagacatttatcaatccaccggtggcttctagtcgatatttggttttataggttggggcaaaagtaattgcagtttttgactttttaattgcaaaaccgcagctacttttacaccaacctgataatattccccagatccttccctgcttcctctcattagtaaccagagcaggctgagaatcacttacctgtctcttgtgttccacaatgcacactttgaccccatctagtctcttccaatatcatttactcttgtccattagcggattttctttacttcctgtgtgtctagcttgttggggggatagggaggagaggagaggctgaggatattttttctgtgtgtgtgtaaaggttattcaaattctttatcacttgcttttgctttttaggaagaaaaaaacatgaatatcttataacactattttttaaatgaaattgttcagcaaattatacttaattatatttttaattttaagttctgggatacatgtgcagaacatgcaggtttgttacattggtatatgtgtgccatggttgtttgctgcacctatcaacccgtcatctaggttttaagacctgcatgagagggtggagccaagatggccgaataggaagagctccagtctagagctcccagcatgagcgacgcagaagacaggtgatttctgcatttccaactgaggtactgggcttatctcactggggaatgttggaaagtgggtgcaggacagtgggtgcagcgcacccagcatgagccaaagcagggagaggcattgcctcacctgggaagtgcaaagcgtcagggaattcccttttctagtcaaagaaaggggtgacagacggcacctggaaaatcgggtcactcccaccctaatactgcacttttccaaaggtcttagcaaacggcacaccaggagattatatcccacgcatggcttggagggttgtatgcccacggagcctccctcattgctagcacagcagtttgagatcaaactgccaggcggcagtgaggctgggggagggacgcccgccattgccaaggcctgagtaggtaaacaaagcggccaggaagctcgaactgggtggagccaaccgcagctcaaggaggcctgtctgcctctgtagactccacctctgggggcagggaatagccaaacaaaaggcagcagaatcctctgcagacttaaatgtccctgtctgacagctttgaagagagtagtggttctcccagcatgcagctggagatctgagaacggacagactgcctcctcaagtgcgtccctgacccctgagtagcctaactgggaggcaccccccagtaggggcagactgacacctcccacagccaggtactcctctgagacaaaacttccagaggagcgatcaggcagtaacatttgctgctcaccagtatctgctgttctgcagcctccgctgctgatacccaggcaaacagggtctggagtgaacctccagcaaactccaacagacctgcagctgtgggtcctgactgttagaaggaaaactaacaaacagaaaggacatccacaccaaaaccccatttatacatcaccatcatcaaagaccaaaggtagataaaagcagaaagatgaggaaaaaacagagcagaaaaactggaaactctaaaaatcagaacgcctctcctcctccaaaggaatgcagctccttaccagcaatggaacaaagctggatggagtatgactttgatgagagaagaaggcttcagacaatcaaactactctgagctaaaggaggaagtttgaacccatggcaaagaagttaaaaaccttgaaaaaaattagatgaatggctaactagaataaccaatgcagagatgtccttaaaggacctgatggagctgaaaaccaaggcacgagaactacgtgatgaatgcacaagcctcagtagctgatttgatcaactggaagaaagggtatcagtgatggaagatgaaatgaatgaaatgaagcaagaagagaagtttagagaaaaaagaataaaaagaaatgaacaaagcctccaagaaatatgggactatgcgaaaagaccaaatctacatctgattggtgtaactgaaagtgatggggagaatggaaccaagttcgaaaacactctgcaggatattatccaggagaacttccacaatctagcaaggcagggaacattcaaattcaggaaatacagagaacgccacaaagatactcctcgagaagagcaactccaagacacataattgtcagattcaccaaagttgaaatgaaggaaaaaatgttaagggcagccagagagaaaggtcaggttacccacaaagggaagcccatcagactaacagctgatcctctcagcagaaactctacaagccagaagagagtgggggccaatattcaacattcttaaagaaaagaattttcaacccagaatttcatatccagccaaactaagcttcataagtgaaggagaaataaaatcctttacagacaagcaaatgctgagagattttgtcaccaccaggcctgccctaaaagagctcctgaaggaagcattaaacatggaaaggaacaaccagtaccagccactgcaaaaacatgccaaattgtaaagaccatcaaagctaggaagaaactgcatccactaacgagcaaaataaccagctaacatcataatgacaggatcaaattcacacataacaatattaaccttaaatgtaaatgggctaaatgctccaattaaaagacacagactggcagattggataaagagtcaagacccatcagtgtgctgtattcaggaaacccatctcacgtgcagagacacacataggctcaaaataaagggatggaggaagatctaccaaacaaatggaaaacaaaaaaaggcagggattacaattctagtctctgataaaacagactttaaaccaacaaagatcaaaagagacaaagaaggccattacataatggtaaagggatcaattcaacaagaagagctaactatcctaaatatatatgcacccaatacaggagcacccagattcataaagcaagtccttagagaccaggaagagacttagactcccacacaataataatgggagactttaacactccactgtcaacattagactgatcaacgagacagaaagttaacaaggatatgcaggcattgaactcagctctgcaccaagcagacctaatagacatctacaggactctccaccccaaatcaacagaatatacattcttctcagcaccacaccacacctattccaaaattgaccacatagttggaagtaaagcactcctcagcaaatgtaaaagaacagaaattataacaaactgtctctcagaccacagtgcaatcaaactagtactcaggattaagaaactcactcaaaaccgctcaactacaaggaaactgaacaacctgctcctgaatgactactgggtacataacaaaatgaaattaagatgttctttgaaaccaacgagaacaaagacacaacataccagaatctctgggacacattcaaagcagtgtgtagagggaaatttatagcactaaatgcccacaagagaaagcaggaaagatctaaaatggacaccctaacatcacaattaaaagaactagaaaagcaagagcaaacacattcaaaagctagcagaaggcaagaaataactaagatcagagcagaactgaaggaaatagagacacaaaaaacccttcaaaaaatcaatgaatccaggagctggttttctgaaaatatcaacaaaattgatagaccactagcaagactaataaagaagaaaagagaagaatcaaatagatgcaataaaaaatgataaagggtatatcaccaccgatcccacagaaatacaaactaccatcagagaatactataaacatctctacacaaataaactagaaaatctagaagaaatggatacattcctcgacacatacaccctcccaagactaaaccaggaagaagttgaatctctgaatagaccaataagaggctctgaaattgaggcaataattaatagcttaccaaccaaaaaaagtccaggaccagatcgattcacagccaaattctaccgaggtacaaggaggagctggtaccattccttctgaaactattccaatcaatagaaaaagaggaaatcctccctaactcattttatgaggccagcaccatcctgataccaaagcctggcagagacataacaaataaagagaattttagaccaatatccctgatgaacatcgatgcaaaaatcctcagtaaaatactagcaaactgaatccagcagcacatcaaaaagctgatccaccatgatcaagtgggcttcatccctgggatgccaggctggttcaacatacgaaaatcaataaatgtaatccagcatataaacagaaccaatgacaaaaaccatattactatctcaatagatgcagaaaaggcctttgacaaaattcaacaactcttcatgctaaaaactatcaataaattaggtattgatgggacatatgtcaaaataataagaactatctatgacaaacccatagccaatatcatactgaatgggcaaaaactggaagcattccctttgaaaactggcacaagacagggatgccctctctcaccactcctattcaacatagtgttggaagttttggccagggctatcaggcagaagaaggaaataaagggtattcaggtagtcaaagatgaagtcaaattgtccctgtttgcagatgacatgattgtatatctagaaaaccccattgtctcagcccaaaatctccttaagctgataggcaacttcagcaaagtctcaggatacaaaatcaatgtacaaaaatcacaagcattcttatccacccataacagacaaacagagagccaaatcatgagtgaactcccattcacaattgcttcaaagagaataaaatacctaggaatccaacttacaagggatgtgaaggacctcttcaaggagaattacaaaccactgctcaatgaaataaaagacgatacaaacaaatggaagaacattccatgcttatgggtagaaagaatcaatattatgaaaatggccatactgccaaaggtaatttatagattcaatgccatccccatcaagctaccaatgactttcttcacagaattggaaaaaactactttaaagttcatatggaaccaaaaaagagcctgcattgccaagtcaatcctaagccaaaagaacaaagctggaggcatcatgctacctgacttcaaactacaaggctacagtaaccaaaacagcatggtactgataccaaaacagagatatagaccaatggaacagaacagaggcctcagaaataatgctgcatatctacaaccatctgatctttgacaaacctgagaaaaacaagaaatggggaaaggattccctatttaataaatggtgctgggaaaactggctagccatatgtagaaagctgaaactggatcccttccttataccttatacaaaaattaattcaaggtgattaaagacttaaatgttagacctgaaaccataaaaaccctagaagaaaatctaggcaataccattcaggacataggcatggacaaggacttcatgtctaaaacaccaaaagcaatggcaacaaaagccaaaattgacaaatgcgatctaattaaaytaaagagsttmtgcacagcmaaagaaactaccatcagagtaaacaggcagcctacagaatgggagaaaatttttgcaatctattcatctgtcaaagggctaatatccagaatmtaacagtgaactcaaacaaatttacaagaaaaaaacaaacaaccccatcaaaaagtgggtgaaggatatgaacagacacttctcaaaagaagacatttatgcaaccaaaagacacatgaaaaaatgctcatcatcactggccatcagagaaatgcaaatcaaaaccacaatgagataccatctcacaccagttagaatggcaatcattaaaaagtcaggaaacaacaggtgctggagaggatgtggagaaataggaacacttttacactgttggtgggactgtaaactagttcaaccactgtggaagtcagtgtggcgattcctcagggatctagaactagaaataccatttgacccagccatcccattactgggtatattcccaaaggattataaatcatgctgctataaagacacatgcacacatatgtttattgtggcactattcacaatagcaaacacttgaaaacaagtgaaatgcccaacaatgatagactggattaagaaaatgtggcacatatacaccatggaatactatgcagccataaaaaatgatgagttcatgtcctttgtaaggacatggatgaagctggaaaccatcattctcagcaaactatcgcaaggacaaagaaccaaacaccacatgttctcactcataggtgggaattgaacaatgagaacacatggacacgggaaggggaacatcacacactggggcctgttgtggggtggtgggaggggggagggatagcattaggaggtatacctaatgttaaatgaggagttaatgggtgcagcacaccgacatggcacatgtatacatatgtaactaacctgcatgttgtgtacatgtaccctaaaacttaaattataataaaaaaattaaaatataaaagacctgcatgcattaggtgtttgtcctaatgctctgcctcccttttccccccatcccttgacaggccctgatgtgtaatgttcccctcgctgtgtccatgtgttctcattgttcaactcccacttatgagtgagaacatgcggtatttagttttctgttcctatgttagtttgctgcggatgattatacttaaatatttttaaacaaggctttagacctaaatccatcaaaataaaccactttgcatgaaaaaaaatcatgggaccatttcagcatgttctataggtgggctgatttaaatgatttccttatacatctctttctgcttgtgctattgaataattgagaagtttgcagggggtgtggtgccttgcacagaccgagaaggaagagaaaggaagcaacacttgcaaaaggactttgttgtgtacagtgatagaatgctctacctgtgttactcattgaatcaggaggattgttgaaggaggagggctctctggaattgtaatctgaagaatgagggttattcatcaggaaaagagggcaaggcaaggggagggggaagcataggagaagaaataaaaggcccagaattctgaaaaactccatgctaaaagacccagaattccgaaaaactccatgtcagcagggtcaaaataaattttgtggaatggttacttagattgagagaaggactaatgagaaatgaaactagaggtagagtcagagatcagttaatagtcttctattttaggttaaggaattcccatttcattctgaaggtcaaggacaacttaggtaaagggcagtgactaagaaagaccaccctggtcaggctcgatggctcacccctgtaatccaagcactttgggaggctgaggcaggcagatcacttgaggttagcagttagagaccagcctgaccaatatggtgaaaccctgtctctactaaaaatacaaaaattarctgggtgtggtggtgcaagcctgtaatcccagctgctctggaggctgaggcaggagaatcacttgaaccctggaggtggaggttgcagtgagccaagattgcatcattgcactgcagcctaggtgatagagtgagactctgtctcaaaaaaatagaaagatcattctggcttttgggtggagaatagactgtccatgggcaaagtcagagtccaggaggccatgccagaagctgctgctgtactttaggcaaattctatgtggtggtggcattggtagtaagagtggagaggaatatacaagttagcgatacatttaggaggtaggttcgataaaacttggtgatttattaagtttgaaagtgaagaagagggaggagtcaggattgacttacacatgaaacatataagacttctttctgtcctaaaaaaaaaaatcaccgttgtagaaaatgatagaaactgatggacataagaaagcaatcaggatctcgattctcaatgccatgtgaagaaccacatgctcttttgacattttaagtagagatgtacatttggtttctgcagatccatttcatagctcggctatgatttcagactcattactcaaaagcaagggtgtaggatcaggggagggtgaacaagttaggcagaggaatgagctgctctgtgaggtggtttgctccacagcctttcactccttcttcccaacgtctcacagtcataaaaaaaaaaaaaaaaaaaaaaaaaagtaggagggagtgcctatatccagtagaattggagacaagttagggacagagctcagagagctgctcctgatgcggaagtggcaagaaaagacgcttcacctccctgacaacaacacatccactgtgtgtagcaatacgtttctgcctaagacaatttacccccagggaaatacaagaagggagacatctcccaggaaattaccatttgtttctactactgaaggattttcgtctatttatttgagaaaagtgagaagcttctttttgctgagaacatagtaaatgctgcaaaagcatttgatgtcatgtccattaagtaacttggctgaatttcttgaagctttaggtaccttgcttcaattcctgcatactatttactgaccctctgtaacaggacttttcaactttcaactatattagaacatgtagtttctctattaccaagttccagctgaacagtctatctttaatattcagaaagtgtttggtgtctactagccaagactgtagtctgagcaatgacattgacagtggaccttgatcttccttcctttgaagcataagtgccttgtatcattttactttcctctagtagaagtccttcctatggttatagtatttagtttctactttttgcatttaatcggagcatctttgtaatttacaatttttaaatctttttttttcaaggactaaacacgaaggtttgaagtccaacaggcaactaaagatgtatacaaaccccgcacaaatcagcctccattctaatgccattcctcttctatacttccattttttaaacctgagcatatattttgttttgagtcttttcttactcttttatttgttaatactctttattcagtttttgtcaggtaaaaatgttttgccttgccaaagaaccatctaattccttctcaggtctttttaatatattgcttccagatatttttggattggtggtttctgcaattctccctaaaacaatcttcgtttctcttacacatctcattctctacgctttggcagacttttgcagatgcattctataactgcacaaattacccttccaattttctccagctaaacaatctaatccagggtcctaaatatttttggtgccatagactcctttggcattccagaggtgcccagggattttactcaggatagtgtctttaaatgcatgtttaaaatacatcagattacaaagaatgtcaattaaattgaaaaatagcttaaatattttaataattgtgatatagtaataaatgaacttctttaggtgcattaagtaacaagatctactaacagggctaataacttattatttcagtatgtctgtggtttctattggtgacaaaaatcacaagtactgttaatatttttgttttattttgtttaaaattatttaaattttaattaataaaacatatatatgtatatttatggtgtacagcacattgctatatgtatacattgtggcatggctgaatcaaagtaattaacatatgcattagctcacatagttattttttgtggtgagactgcttaaaattcactctcctagcaatttttgactgtgtgctgcattgtttttttaactatagttagcattttgtaaatagtcctcttagaattattcccccaattgaagttgtgtgccctttcaccaacatctctgcattttctccttccaccactctctgtcctgagtaaccaccattctattctctgcttctatgagttcaactttcttagattccacatgtaagtgagattatgtggtatttgtcttctgtgcttagcttctttcacttaatgtaatggtgctgttcatattactgtggttttggtgcctacattcaaactcagtggaaattctaatttgcagttagtttttcagaaagaagaaatgtgtgaatagtttcttatggtccaagcccttggatcctctgtattttatccacagatgcttgggaggatctctagatcccagattaagaactccagctagttattagtcctttgtgctttgaaactcaaatcaaatacccatctcttccatagaactttttctaaattcactagactcacttatctacccttcttcctatagtttcattcactctctgttatgaaatatccatttattatcactattagtttttctgtattgctctcttctttgtaaatatctctatactttattctcttttatttcctttgtatccaggacagtgtctggcatatgcaggcacacaataaatacttgtttaataagtgaattaaaactctagacagcttctggtaagtttttccaggttaccagtaatacaaagacctgaatgttatttattcacttctacaaggggcacagtgtccaagtcctgacctttaataagagatgtgcttccagcagtgtcttcttggcatagtcttaaccttttattctgccctggtgcacacttaatctctcatgaagtcacagctattgatttataactgaatcttcaagatattttaatactttataaacatacaaacaacaattaattgcattgttagataaaaatgtattacagagatcaccagcacaaaaataagtatttctatttataactgaaaaaaaaactggcaatggaatattagttgtttacaaggcaagtattctgaataatgtgctgggagattataaataaccttaactaacagtaaaaaaaattgtgcttacagaaaaaaattatttgagttagtctaaatgtattaaacttatcagtaagtagcatgaattaactactattcaagtgtaaaattctacttccatattacctaattcagttccatatgaagtcagccagcaaggatcagctgaggttggctgttgtgaggtttcagccattatgaaaaagaggagctgggcacagcctctgatgaataataacatggcatgggttctgataataagcacagagaatcagaaaggaaaaaacacagagaggagtatggagaactggaacctgtggaaaatgatacacaatttttttttttctacagagtctcgctctgtcacccaggttggaatacagtggtgggatctcggctcaccacaacctctgcctcctgggttcaagcaactctcctgcatcagcctcctgagtagctgggattacaggcatgcgccaccatacccagctaatttttgtatttttagtagagacagagtttcaccatgttggccaggctggtctccaactcctgacctcaggtgatatgcctgcctcagcctcccaaagtgctgggattagaggcataagccactgcacctggccccacaggcttcacagtcagtaggcccaaaggaagtctggtgtggtcgatcaagaatccagctaattctcgcactctcactgtctctctctttctctcaccttccactgacctctcttccctcctattttgtcttgggaaaaggcaggtgattacaaaattcttctaattatgtattttaattaatataaaatctttacaaaacagtgttaataccagcccactatggtttatattttttgctgtgaaaaaaaaatctcctatgctttagcaatactttttaggcagagagtcatcaaaataaaagagtatcagtattgctgaagtaggtcattcctgctttactttaaaaaatttcaaaacgtttcatttttcctccgtaaaatttatttctatcaaggaaatggggagagaaaaattacaatgaaaaactgtgaggataaatgaggtcatatgcctatgaaatatttggaaaagaattataattatcaacttgttcatttttaataccatagttagatttctcattttaaaaggggaaggaaagaactccattacattctagggattctaggcaagataagtttccatcacagttgctggatggtggagctgggctggtatgacattctttccttgtagaacgtgcgttctaactgaagactagccctttattagaaatgcacattgagaagacaggggatttatgagtcacaaaggccaagatttctaaccttgctacatgtggggcgggacttttctatgctcccaaggacttaaggtcaagtcactttcttcctgttcccgtctccttctgtcttcctctcttttttggttctaaccagaaaatgtattccaatttttcttttctttttctgttcaagtcttacagctctgccaaaggcaaaatgctgcagggattagaaagatgaagcagctaagtcaaatcgatagtgacagccagtgaacgcatgtaaatttcaacaagtgaacgttcagcattgtctctggggcctcccaccaatattaacatcactaaattttctgatttaacattctcacaaaacaggaatcaaccaaccaagtgccagccactaatagccttcaggttaataaatttggtcttcattaatctcaaattagagtcctggagtagacttatgtttgggataggagtgcccatcctacaagaagcttattacccataaatcaggtaagagataagaaaacactcctccaggtctcattagccacttcagataggctctgcagctctttaatgttcaggtggcatgtccttagaagatgagctgagaatcaaagctcctgatacaggaagaagcctaactcagcccatctctcttcttggggcattcacaattatttcctttaacccttgtgtagtttcagttgtgttgattcaagtcattattttcttacacaactagggtatatagtttagaatgtgatagaatcttggaaaaatagcaattccccattatgtatacacacaatacacatacacacacacagtactatatatgtatgtgtgtgtgtgtgtatatatagatcacgtaaatatatatgatatatatagatatatagagagagtacatgtacatatatgtgtataatatattcttcactttcattttatttgtctttatgatttcaggcagtggtataagaagatagaaatagcatatgagcacttcacacagtatctgctataaaagtttattttgacactttacttataactccttgaaagtgataaaattttcctattttcctgaaggtacatttagacaaaaatctcagagcctaatattttgaagtgttagttttgctgaggccaaacaaaatcaaggcccagcatataccccgaatacattctcacttaccataaatttattatgaaatggtattgtgttgataggagagtttttgttacagcctataacatttcagggattttgatagacatgatttccaatgggataacatttaaactgagatagctactatttttttttaatatatgtttagttttgtgaaaaaaaaaataaggaaagcatctggtgattgaacaaatatgtagtagagctaaagacattttccttaaaagaaatatacttgttttatgctttaatggttagagctgttccattatagtgtatcatctatactcttctgatttttattacaagtagggatacaacttaaagatttaaaagtccttcccaaagtataagcatgtgtttaattttcagaatggcagtgagacttacttgcacataaagttaagatacctaggttgtgggcttccaaggatacttccttgggaagtctttagaagttgtttttagttaaggacttggtagcatcaagggaagccatgagtggtgaaattctcagagagactcttctttctgtggtcctgccttgtagatgacattctggagacttttgtgtgtaaatgaatgattgaaattccatagtatatttgtcatttttcctaagcctgtttactctggggaaaatcttctttcatccttctaagttcttactccacactcccgtgggtgctcatgcatgtgtgcatgcgtacacacacaaacacacacaaatatgcatgcacacatcttcagtacttgaggcattaacctgcagaaccataacaccgtgaatatagcagtaaaggcaattatttctgtaaacaggtaacagggtgtattaatattactgttagtacctctgaattctttcttccttaataggatgtattaatattaccgttattacctctgaattctttcttccttcccatcatgctagagccatcttgaatatgacttaagaagtgatctttacattttgcctctgtctcaaactaggttctagtggctattaggggctagaccaaagctaaactgagaataaggttacgatagcacaattgttcataggtggtctctcaagacaacagcattgcaaaagaaggaataattgttatgtttattttacctatgggggaaaaacagtagtccgggcagtctaaatgatgtgtccaccatcatagaataatagagagtgaagctgtaagtataattccggttgactttgtatccagtaaaatgttcattcaacttttgttcatctctcctctagtcacactttgtcatgcattgacttcttggcctgatctcaccagtgaaaacccatgggaacagttaataattccatgactaaggctattataatcctatagctacagtttctccagtgaaataatgaaaatttcttcattaatttattataaaagttactgagtttaattgtatgccatcctggatttcttacagaagtgattcttgataatcctaagaaaattcttcttcagacagattttcaaaatgtttttgtctctgcaattactgttctgaggttagatcttatagaagttactccataagaagccaaagcattttcctcaaagtatagtggctaatggctatgctgttaccaaaagctgtgacagaaaacctctggctattaaactcatatctaatgctatttggcctagctattatgtacaatttgagaaactgatttttctcttctaaaatgaaacacaaggccgtgtgcggtggctcacgcctgtaatcccaacactttgggaggctgaggtgggtggtaatgaggtcaggggatcgagaccatcctggctaacacagtgaaaccccatttcactaaaaatacaaaaattagccaggcgtgatggtgggcccctgtagtccctgctactcaggaggctgaggcaggagaatggcgttaacccagctggcggagtttgcagtaagccgagatggcgccactgccctccagcctgggtgacagagcgagactccgtctcaaaaaaaaaaaaaaaagaaaaaagaaagaaaaagaaaaaaaaagaaagaaagaaatgattcgcattgtagggtcatgaatttcaacacatattacagttcagccccttctctgctgctggtggcacactggagatgtggagatgcagattctcaccacacaaagtggggtccgtcctggaagcttgtaagaaaagcagaatctcaggccctacctagaacctactgaattagaatctgtgttttaacaagatctcttggagattcagaggtacagtaaagtttgagaagcacagctggaaactgtctgaagtctgctatgatcatcttaatcttgggagctgacttagcacagtttctgcctctcccagcccagcctctctgccctatttaggctacttctggagagttccacagtcagaaccttagctatttctgtgcctggtctttaccacacacaggtccaaagatgcccaggaaagctaaatcatagacttccccctactgagcatgttgggctgcctgcagtctctccctttatcataggttggccctctttccacattgccatgcagctttgaatgactgaatgttcaaatttttcacagtgttttcattgcttaacaggacatccatggctgtaatttttcagtgaagcatagaatgtgttaattaaagtggcaatggaattgggacaggttgaatattaaatgtcacttctattgtgaataccatcatgctcttaacatttttattttgttttcatgaagacttagtaagggttaaaagtgggcgcattagtgagctggtatttgcctgcccaccaatgctgattttgatttccatggcgtagttctttggggtcagcatgcatggtgtgttaaatgttaccggggacctgaggaataggagagccctttccttatgacacttaatcctgaattatttatctaaataattaagggcaagcatttttaacttcgttaacctatagtttctgaataaaagagttattgagagctctgactcaaggacaaatgacaaaagatgatccctggagtcagggcatcaccctccataagtctcactggaggtttgcttcctgcacaaggagacatgtctgtgatttgtgaagcattcatcttgtttcacaagactttatgctgcacttaggctaaagtcactgccgaataagtcacttcactatcaagaaagaaggggatggcttttctgggggagcagaggcatattaaggtagaggaggggtggcgcaaagcagtccagccaagaaaaaaaaaaaatcttactaacaggcttagaattaccagcacatgttgatagcagaaagcagattggcttttagccagttttattcttgtttttaaatctctaaagacaacgtacccacttagtgcctgcacttggggcaacatgctcccactcccacctcctccttggtatgccagtgcagaggagtttgttcacacatttaagatattacataaaatacatctctgaaggtcgacactctcagggaagagcaagaaatgactggagcatcttagctgcaagataatgtcttattcagatatctttactctaggattatagattttttttttttttgagatgaagtctcactggatttcccaggctggagtgcaatggtgtgctcttggctcactgtaacctccacctcccaggttcaagctattctcctgcctcagcctcctcagccgctgggattacaggcattcaccaccatgtccagttaatttttgtattattagtagagacagggtttcaccatggtggccaggcttgtctcaaactcctgacctcaagtgatccacctgcctcagcctcccaaagagctgggattacaggcgtgaaccactacgcccagctggattatagattttgacactcagattactttggctggtctagtaggcaaataatgacaagacatgctcctgccaaagatgtccatggcctaatctccagaacctgtgagaatatgctacattgcatggcgaaggggaagggagactgcagatggaattaaaatagctaatcagcagataggaagatcatcctggtttatccatgtggacccaatgtattccaaggagtctttaaaagtggaagagggaggcagaagaagagagacagagtaagatgtgactaaggaagaatggttaaagaaatgtcgctggtatcagagacaagaggaggaggccgtgtgcttcctcttcatgtgggctatgcatattctcactcataggtgggacttgaacaatgagaacacatggacacaggaaggggaacatcacactctggggactgttgtggggtggggggaggaggagggatagcattaggagatatacctaatgctaaatgatgagttaatgggtgcagcacaccagcatggcacatgtatacatatgtaactaacctgcacattgtgcatatataccctaaaacttaaagtataataataataaaattaaaaaaaagtcaaggaagtgaattagaggtccctagaacctccaaaaagtaatgcaaccctggatggcatcttgatattagcctggggagacctgtgtcaaacttctatcctgtagaactgtaagataacctgtgtttttcttgtaaaagatttcaacatttgctttagattcagggggttacatgtacaggtttgttacatggcatcacctagatagtgagctagtacccagtaggtagttttcctgcttttgcccccttccgtcttccccctcagtagtccccagtgtctgttgttcccatctttatgttcatgtgtatccaatgtttagctcccacttataagtgagaacgtgtagtatttgattttctgtttctgtgttaatttgcttatcaacctgtgtttttaagcctttatggtaattacttatggagcaatagaaaactagcacaatagataaagtcaaaattggtatggtatgtagaacctaacagagcacggtcctggctccacatctgattagtaatgtgcaattggtaaatttctttagccttattatccttatctgtagaatggacataataatatttaccttatggggttaagagagaatgaaataagaaagcaactataaaatgtctgggataatgcctatcagggtggggctgcccaaagatactaaatttgattttatttctttcctcttatacaatttggtggccctcttagtgagtggccccatatcgttaaggcttactgctaactggcccccctgagtccttagaaatatcaccacatttattgatatttcactgtgttcctctgagaacctcatttggccatatagtcttctaccaatcactggagttttcattagtgctagattggcattagacacatggttatagaaggatctagtagattattattttgtaggagacatcatcagtgctcatgttaaatgaatgatacattctgttgaattataaactgcctctcctacacctttgtctttgtacatttcagtccttcttctctattcaaaactgacgaagtaaatcagttgggaagaatacagtaatttatttgaataaacatttgtcaacattgtttaggaaaataagttacaaattgactgtatcgtcatgttcctgcactaagaaagcattaggagtctgcctaaatccttttatcaaaatgtattattattattattattattattaatttttttctatttactctttcttttttaaaaaattgctctcctctagatattttttctgccactctttataataaaggagacaatatttctaactgcccaacagacttcaagatgatcttgacagcctctgtagccaaattatcatattaatttgatctcagcaacacttctggttcactctgttctgtactcaaatccaaatcctgagctttttcttgagcaaataaaggcaacagctgtgaggtcccagttcatctttccggttttacccatacaacaacaggctgtgcaaagttgtgagcaattcacacatagtgctctcaactctatttttattaagtactctgaagagcaagcaatcttcaaactcctataaaatttcatgaccaaaacagctatcgggatggtgtttcccttgaaatgtctctatgagtacagtcatttattattctaggcttcctgataatccttattagtggataccagaactgtgattttaccgtatttgcaacctaatgagtaagtctaccacatgaatgctggcagaagatacaagattcctgggtcagagatgaaggatagtttattgctacaggatagcagaataccagcatttatgccagtccctaaaatttaagtcccatggggcaaagggaagagggccagacaatgcctgcagatgtaataggggagagttgagtttagggtacccccaaattttataataggcagtactttggtccagataaagacatgttttttatactggatagtagacaaacatccatttgctccagttggagacaatacttctgtcttcccatagatgttcactgtgcaaacaattcttgaaacaattgcctggaacaaagttatcagttattagattttttttttttttgagttggagtctcactctgtcacccaggctaaagtgcagtggcatgatctcagctcactgcaacctctggctcatggattcaagagattcttctgcctcagcctcctgagtagttgggattacaggcacccaccaccatgcctggctagtttttgtatttttagcagggacagggtttcaccatgttggccaggctcgaactcctaacctcaagtgattctcctgccttggcctcccaaagtgctgggattacaggcatgagccaccacacctggcccaaagttattagatcttctgttcacaagatacacagaaatgtgagaggccataacaagttgtcaccctacaatgagtttcttagatgtaaatcgactcttcccttcctatgttggtaagaattgtgccatatgaaacatcatcataggcatatgtaatgttaagcttttttgccgtaagagaaaatttttccttgcttccttagcagaatacaggcttcagttatgtgatcaacctgtttggatctgctaggttaaactataaatgcatttttaaaaatactacagatatttcactggacaggaaatggggatggggaagacagaggagagagtgtatggcctggtaacaaagcattaccctttctgttgcacactgctgcccattttaatgttggccagcagccaggacaaagagccaaggcagctccaaaggatctcagagttggaggcaagagagagtcaaggaagctcccacatgctgaaatgtcaaacctaagcagacctggcctcagagtacaacacaatcagatcttccaccatcagagtcattgatagccacactggctcccttgctgtttctggagcacagcagacatggacccacttcaggtcctttctgctggctctggtctgtcataggtacactccttcacctgatcacccagggatcgctttcttatttccttcaagccttcttcatccaagtactgaccaggcctcacactgcttagcttccgagatcagctgagatcaagcacgttcagggtgataaattagttcaatcactgtggaaagtagtttggtgatttctcaaagaacttaacacagaacaagcattcaacctagcagtctcattactgggtatatatccaaaaaagcacagattgttctaccaaaaagatacatgcactcacatgctcatcatagcactattcactataacaaagacatgaaatccacctagatgcccatcaacagtggataggtatacatatgatacgtatacaccatgtaatactacgcagccatacaaaaggtatgaaatcatgtcctttgcagcaacatgaatgtagttaggggccattgtcctaagtaaatcaatgtaggaagagaaaaccgtatgccacgtgttctcacttttaagtgggcacaaaacattgggtacccatggacgtaaagatgggaacaatagacactggggactactagatgcaggaaggtgggaggggtgaaaaagctaactattgggtaccatgctcggtagttgggtaatgggattatttgtatcccaaacctaagcatcacataacataaccaagtagcaaccctgcacatgtaccaatgaatctagaattaaacttgaaaaaaataagtaagtaaaacataaaacatatagatttttaaaaggcatcttcaaatgtcaccttgtagtgccccaccctgaattgtagtcacctacacacataaactcacacacaaacacacactcccatacacacatcaaaacattcaatacacctaccttactctatttttttttctgacttccaacatagtacatcatttatttaacaagaacgtaagctcaacggggaggaattgttctctgtttattttctgatgtttcctaggtacctagatcagtgcctggtgcatatataaatgaatattttgagtgaatatttgtggaatcatgaatgaatgaactgatgaatgttaatattggtatttttcattgttatttgtcttattcctaggaagacaggactagtcatttgaggtactttttcagaacagccagggctggggaggatcctttatttgtgggtgttaaataatagcaagtgaacacagtgcagcagtagtgaccctgttgatgatgataatgaatcacattgatatagtgcttttctttttctacctttgtgtgtgtgtgtgtgtgtgtgtgtgtaattctcctcagtgtcagggtgatagattatgcccattccttctaggaaaatggttattccatcttaatgcaggcttttagaaatgaaaaataatgcctgctacaatcaacttttaattatctacactaatggagtgctgatgctaaagaaataatccccaagtcatttacatttgactttaggatgcaaccgagggcttgtattcagaaaagcacgttaaaccatcgtcagcagcatgtgattgcagaacaaattctggcctgggagttgggaaactggatttggtagaggctcggtgttatgggttgaattgtgatgccgcccccctgccaaaaagatacgttagaatcccagcccccggtaactcagaatagaaccttatttggaggtagtgtcttgacaaaggtaattaagttaaaatgaagttgtttgggtggaatctaatccaatatgactggtatttttatagaaaggggaaatttagactgagacagagacatgcatacagggaagaatgccatgtgatgcctggaattatgctgccacaagccaaggagctactgcaagttagcaggaaggcctgggacaggcccttctctagcacctgcagaggaagcagccctgtggacaccttgatctcaaacttccagggcagtaagacaaccatgtctgtggtttaagctaccccattcatgggactttgttatgacagcccttggaattgaatatgcttggtgactcaactcttatgtgctcatctagcatacagttccctctcatctccaagcctccgtttcctcatccctaaaatagaatccaaagcccctagctgtttaagggctctataattagaaagcttctgacagaaagtccccatcagctcctcccagtttagcagtaaacccatccacctaggtgtcctctaaattaggtaagtgaccctagaagaaagttccacacatcatctgaaccgcggataaaatgcatgcagaaatgactttattcaaattcaagagtttacattttacttaactctggaaaactcagagtttaaacattttcacatttttttttaaatagcaagaatggcatgccacatcatgatgattcagctctcatctctatttctctaggcagaatgcatttacacatcatccaatcccaccctatttccatgtactattagcagaagcaaatatcagccttcttcaggccctggcaggataaaaattcagcccagtagacactgggaggacaagaatgaggatgtgacttacattccccagggccatggcattcaaaaccaccatacccactgaatgtgcttctctatcgctttgtttaatatttggagagtagtgtttgctccaaaacttgtaaaaagtgagaccaatggaaaccattggtccaaagcaatcttacctgagaaacattttaaaaagaagtctttcccttatgattcctcttcttactctacttttttgaataaagagattaatacccaaccgatgactactgcaaggatgaaggttattctttaggagaaaaaaaaattgtaacatacatttttatgaaaaaaagatttctaaatatgctgataaaatcactgacatctcagtaaatatagtttattcctaggaagtgactagaatgattgatttagctatatgtaagttatttaatactgtttgaaaggtacttcatcaacaccatttactgtgatcaatagcattttcaggaacacttcagacttggggaggttactcctttgggtaaccttttaggattatctgttgtgggaacaagaagtagccatcaaaagccactgagcaggctgggtgctataatcccagcattttgggaggctgaagtgggaggactgcttgaacccaggggtttgagaccagcctggacaacatggtgagatcccctatctacaaaaactatattaaaaaaatttagcttgttgtagtgtacacacctattgtcccagttgctcaggaggctggggtgggagaatcacttgaccccaggaggtcaaggctgcagttagcattgcttgtgccactgcagtccagcctaggtgaaagagtgagaccctgtctcaaaaaaaaaaaaaaaatgtccctctaagcagttaaaataggtcaacatcaaagctcatggttctggctcttagtcaaagcctatttatatctgacataattctcatatattgcatatattgacctgtttggtttactaatccacattagaggccaacagtatagaaccagaatcagaaaatctattaaaaggaaatgaaagaataaaaaagcatggcaatatcaggccattaggtgtgggtacaaataatctcccaaaccacagtagtctctgagtgtttcactgacaaagtttagttatcgataattataattatgaccttgaaatcctagcgtagacattgaatactatgtttggaagtcagggaattgtttaatatatttaagaaagatattcccttcaaagcagttcaagtggtcttagtattgccagttaaggaagtgggttacaggatcctggaatgactcagtgatatagaaaggctcagtccctggcaatgtcagatgagtgaagaggttgatgcaaaagtaattgtgatttttgccattacttttaaatgtaaagtacaggcactaacatagtattagttactaatagtattagttatttagtaaattacttttgtactaacctaatactatgttagtgcctgtacaaataatgtgcagtaaaaacaatgagtgtgtgtgtgtgtgtgtgtgtgtgtgtgtgtgtattggaaagcagttgatctgtacacatacttacagtttactaaacaaatgtttgagtgcctactgtgtgtcttgctttggctgtgctctagacagtcatgataacagagatccctggtctggggaggtcccactctcagagcaattacggaagaagggtagaggaaatcatgcaagtatgtagggataggctgatgagagcggaagcatgagggctgagagctgcaggctgtcttcccactagtcagggaaggctttctgattaaagaaaattttcatcacctatgcttagaagtttagactcagaataactgatggcaaatggaaaagatgaaataaactaggatgagaagacaagactgcccaattcacacaatgaatccagtctctgaatcagtcgggtgctagccaaagcagaaatatttccagcagagccctgggaacagagaaggaggcagtttttattaaagtcttagtttccaaatgatggatgccaacaagaaaatagtttaaaattccaagagaagccttcacctttcattccattgtagagtaatggctttttcaaacacattcaaataaagccagggttgttaagtagtatgtctcaatcaacatactcaaagtctgtgaaccaaaggcatagtcttaggcttcctcttatagtctagcatgatattattctatttcatctttttttatatgtttgctcccttgagtgttttagaatgagactgctagattttatgtttctaaagctggttttctaccaggcctgttytcagaacattctttttttttttttttttttttttttttttttttwaagatagagtcttactctgtcacccargctggagtgcagtggcgcgatcttggctcactgcaaccttcgcctcccgggttcaaacgattctcctgcctcagcctcctgagtagctggaattacaggcgcccaccactaaccccatctaatttttgtattttttagtacaaaatgggatttcgccataatggccaggctggtctcaaacacctgacctcaggtgatctgcccgcctcggcctcccaaagtgctgggattacaagcatgagccaccacgcccagcctagaacattctttcttggaaaggaagaacatcacagccttctgtgcattctcttgttcacccacataggcaaggtgatgtgtttgcagccttctttttaccctcacctctgggaggtggccttggctcatcacctattgtttcatgctctctcttaaaggctgatttggtgactgaattcatcattgctgcctacacacccatggggctagcctgggcaaaatgtgcctcgtaggttgcctgaccttttgccttttggcaacgtttatcacctctgaggattcagcttctttcgtcagaaagtgagaacttggatcaggtcatctctaaggttcctttcagttttaacctttcagaagtcacacaaccataaacatttggtgtacctagactgttggcttattgtccgactttaagccagtcatttcagttaaacaaacaaaaatgggggcttgccagagtcaagtcatacaagactgctttcctaatatttggtgcttcttaaatgaagttgttatttatgcatccctcaatcccctccctcttctgcatattttgaacttgcaaagccttctgatattttaagcagaaggttgcaaatgcttgtcctactgcctggccaagtcttaggtaaaaattgtcacctaaccacatcctcagatcatttcccctgtactctagatcactaagcgcatgtgcacacacacgcatgcacgcgcrcacacacacacacacaccatccaggatcctcctgaggatgaatgaatattcctgggccaaatattgcatgaggatttgggcaatgttttggctagttgaacaacaacaatgctcatatttatgccaattggcaggaccattgcttgatcatcctgtacttggtgaagggcattttttattgtttccttttttgtttgtttgtttgtttgttttgtgaggcagaatatcaccctgtcccacagactggagtacaatggcatgatcttggctcactgcaacctctgcctcctgggtcctagcaattctcctgcctcagcctctcgagtagctgggattacaggtgcccaccaccacatcgggctaatttttgtatttttagttgagacagggtttcgccatgttggtcaggctggtctcgaactcctgacctcaggtaatccacctgcctcggcctcccaaagtgctgggattacaggtgtgagccaccatgcctggcccaagggcattgttttctaatccagataactaagctatccttagggtgatatgtaatgcagcaattgctagaaaatgacatgttttcataatggatctttctccaccatctagaaatttaggtaaagttgaaagaaaggataggaggaaccatttactgtgcacctactttcttcctgagattttatacatgtcatttgatgtttacaccaagtttttgaggtcaatctcatatccaaagctctaatcaattaactttaaattagttaatgacagggctctcttattcttaaacctgtcatttcccctaaactatgttgttttcctaaagtgagattaaaagtttgaaaacaaaggaacaaaatgttcatttatttactacgtttctgaaaacttgcatatatcttaatatatatatatatcttatttatatgtcttatttcattgttatgaaaacckagctttctttccttctatcctttcaatattatgctacttgtatttagtatttacattgtatgattcaaaatattgttcactgcagagccaagtagtagactatgaccgctctgcttattttgaacaatcttttatttttttctggagttgataattgcttcagatttttgtctggctttttataagcctgttgataatttcctgtttattctaatgtctgtcatatgcctatccatggagttaacctagtttcattttgtttttcatggccacatctttatcctcctttctgtgggggccctcagcttctgctttaattccagctagatactttctgctttcattcccgctatatactctaattccagctagatactttctgctttcattcctgctatatactttaattccagctagatactttctatgtgggctgcaaaggtgtagccctgatacttttctcatctatcatcctgagacttcatcttacaattaccctgttttccaaatctcatgccttctacttccttcctttactctccatttagaatatttttcagcagcttctaaattagcctacataagacataaactcttagatcttacttgtctgaaatgtctttcacatatgattggtatttgagctaaacataaattagagattgaaagtcatttctcttcagaattttgaagacttctctactctttttctttctgctgttgtttttgagaagtccaataacatatttctaatcctttgtattttgtttcctctctgaaaactacttagatattcttttattacaaatattctaaaatttagtaatttttaaaattctctcattgttttaaactttttttttgagtggagtttcactctttttgcccatgctggagtgcaatgacacgatcttagttcactgcaacctccgcctcctgggttcatgtgattctactgcctcagcctcctgagtagctgggattacaggtgcgcaccatcatgcccaactaattttgtattttttgtagakacaggatttcaccatgttggccaggctggtctcaaactcctgacctcagatgatctgcccgtctcagcctcccaaagggctgggattacaggcattagccactgcacccggcctgttttaaacatttaatggactcaccagggaattttcttgtcttattactttgataatttcctccactccattttccctctaatatttttactttcggggattcctatgagtttgacattggttcttctggactaatgtttcctctagtgttttttgaagatgtctttttggattaaattctagaaaccgcctcaactttatatttcattgttgctcttgatggttttaatgcagatactgaatttccaagagtgctttagttgttctcttagtgttcatttcatagagcacgttgttctcctttaagaggtcatatcttctctttaacttccaggatttttttaaccgttttgtctgttctttatattatgttacttttctctcatttgctccacttcctccccaccccacccctgtttatttagatctcttcctttcatagtgaaggttcttctcaattcactagctacctcaactgtccctttgtatttgagaacaaggcattgagaagcattattttggaagctctgtgtgcatgaccaggacttgtcaaagactggagcttatcacaaggggatcagatagaaagctgtcttttctataagaggcattcccaatgttagtgtctgcaggccttctagaactggaagcagaaagtccctcctcggcatgtagagtctcactcattcccgtttgcattccatcacctccctgccctgagccctttgcacttgtggtacatgttgtttgaagtatgatgcttcattgattagattccttcaggggtaaaatctccattctcgtgtggggaaggtgatactttaagtcacctggctgtgcagcaacagagagggaccaggtagtctaataacaccttatgcagacttccaactcttgtttctcactataccttattctataaacttctggggaaacggctttctttgaattctgagcctttcttaggtatatttcaggccaacttacttgtaccttgtccatacacttgtcaactggcacccaagttcaggcagtctccattttaatcaatcagctgctgctcatccacctttcattttatcttccaaaatattgttataattcttatgcattggttagcttcttttctttaactttgtccttgtggattactactcattttggtcttttattgttactttagtggcatttcaggaggaaatggaatggaagtgtgaggtcaatgcagcatatcaaccagaatctagcctgaattgcaactgtctcacaataggtgccggactctgcagttatggttctagatagtacaaaatttcctctctcttatgagaaatatgaaatcatttaaagcagttaccttttctaaacaattccatggactctgagtcaaaataatttggcaatcatttattccaacctctcctggatgcctaaactatatccctaagaggtgattttacaatcttgaattgaatctctccagtgataaggaatttacttacacatgaaatgattcattacattttcaagtcatgttgtggtaagagttagagtgcttctaagtatctttgttaactcctaaaatctgagtcttacaaataactgacttatcaagttgtaaaaagtaaagagaaaatccccatttctcctactttaaatagaccgtagaaaataatgatgtccaaatttgtcaaatacgtcaaactcaactgcatataggaccattggtgtacttataatccaagaagtgccaacacaaccatatggcatcagttgaagggacctcaagaagttaatgtggatttcacagtggcaaggctgatggctttagtcttgctgaaagttctgcttgtttgatgagaaatatttatataatattttcagaggcttatttcttgtatgtaaactctcagatgtgaaagggaattcatttgctgcatattgattagctcgttgagtgttaatttctcatggttgtggtctgcatgagagaactacaatcagctagagtcaaagaaaagtggatgcttccaccagctgatttttattttatttttatttataatatggaacactactgtaaaagaatctttgcctgtctttccactttataattataaagaaaaggaaaaaaagaggttagagggcccttcaaggtactttaaaatgtttttttcttagcaattcaaaatgtcctagtgaaacgggagagttccctgactcccttcacaggacttgtgacaggggtgtcttgtttatttggcctcagtgctcaaaccccttatgggatggggaacatgcaggtgcacaggagcagaagccagggtgagtgcttttgggctccagccccacagtggtgtctaggggtgttacaatgctcttttagccctgccatctggagatggcttaagtgttaaacagctcagtgaaaagtcagtgtgacagccttttggggttcccatacccagtgtgtcctgaattcttgttcagtgtccatgaagaatgaggtcatacagacctgaaggctggtgaatgtggggattttgttgagtgatggaggtggctctcagcaggaaggggaacgggagaggggacggagtgggaagatgatcttcccctgtagttcatcggtcccgtagctgatttcctctctgtccacagctaaactcctcttgaccttcagacacttcctctcttccctcctctgctgcactgctctgctgctctgccactcttctgcttgtggagcctggatattggggtttatatggatgggcacacgatagggggttgcagtgggtcaaaaggcaacatttgggtgcaaaaacaggaatgcctgttctcacttagggctgcaggtctacgcttgagggtggaaccctcgccaggaactcttttgcctcctgtccatatcactaggaagaccattgatgtgtttgatctttgtaaaactacatatgactctcaagttgcaagtgatactgtggttcagcttatcaaatactggaatttggcttctgtcactgactctgccactggctttgtggtcctgaacgcagccctgatgtcagatgtgttggtaatcttggggaactttaagcaagccagctttttttttttttttttttttttttaggactagatggaggtaagggaaagtgtgagacaataaaactggcaaccagaaacagaagaagaaaggaagagagaaaggaatctacggagtgtggaagttttaggagtaaatttctatataagttgcaaaattttagtaattctttagttcttatttcatttattcacttattttttttttcttttkagacagagcctcactttgtctggagtgcagtggtgcaatcttggctcatgcaacctctgtctcccagcttcaagcagttctcctgcctcagcctccccagtagctgggactacaggcaccagctaactttttttatttttagtagagatgggatttcaccgggttggccaggctggtctcgaactcctgacctcaagtgatccaccttccttgtcttcccaaagtgctgagattatagacgtgagccaccacacccagcctcattcattcatttattcattcaacaagtattaattgtgtgcctactataggccaagtgtattttgggccaagtgcatttctatgagctaaggatatagcagggaataaaacagttacctccatcctcatggcacttacattcatgtacctgcaatccccatcagaatcagcaactaggaagagatgatatcagagcttgaacgtggatccagtaatacccatggatagttctgtggaagtaccacagagaaaaattcaaaggaaagaggaataggatatattgagatacaaaaagtgtagcaatggaaaatcaggtgatcagattattgagaatgaaatatctttagtaaagatttgaaggagttgagtagagatatctcctagatatctacacctacatagaagatcatgccaagaggaggagcagcatgttcaaaggagagaatgggtatgacatgtttgaagaatagtcagtagtttggtatggctacagctgactcagtgagatgggaatgaggtcagaaagatgaggaaagggcagtccagattgtgttgggctttgcttgcaaaaacttcagctcttacttggtataagacagcaaaccattgaaagagtttgtgtagaggagtgacatgatctgacttcttttttaacaagatggctcttattgtatcattaacagcatggttttacatgaacctatcgttttgtttagtttgtgggtcaggactgaacaatgaaagtagaagcagtcctgtgacagtggcactaattacatttattgtcatagagaaagctcatgccagtcacatactagtcagaggagttttcagtcctaattgccacagaacaaatgactttggatgttaaatggactatagtcccctcatttgcaaagtggggatagtagtatctatatagtgaattatgagaagtaaatgagaaataacatttgtgaaaatgtctgacaaaatgcctgaggtgttaacggatcttttaaaatgttaactgtagcctcaatggattgtaagaatatacacatttaaacccattgacataaattatggctagaatgaaagttttgatcatcttgatgatagtttttgtcttttgggtttctttcttgtgtgttctatctgaagaaaatcatctgaaatccctcatttagaaattgaaatattttatgtcagcaagcacatatgttaatgatttcctgaatcagaaatgtgttcaaaatcatatctatagcaatgatcaccacagcggtagttctattagggaaaatacacgaaaacaaatataaaacaataacaaattaagtaactaattaaataatgtgtggcatggaaataaatgaaatactgtgcaaccttcgaacaccattttatagaacaaataatcattggagaagtagacgtgatatgttgttaagtaaacatatcatataaatggcttagaggcttagagatgtrtaggaaaggaaatactctaaaatgttaacaagaatggtatctctggtgcaattaaaagtctttttaatttggatgggtttttttatattttacaaatatttctgcattgattctacattacttatgtaatcaaaggtgcccaatacgtgttacttaaagaatctcttcaataattagaacgtaggcactcaatgctcatttttttccccagtgattctctgaacgtgtgttactaccatccaggagcagaactatatcttgctgagacatttgtgataatgacaaaacgtttcaatcagaaatttgagataaggatatataaatgattttttctcatgagaaataaaacgcaggtgtgttcaccaaaatcctgctcttttactcaatccccttggccaaaagtaagcacgacctctctggcattgtgaacaaaaagaggaattaactcaaaaagactaattttatgcattagatgatcctttagaataatcaagcatatgagtattagggtaacttatcctttttacttttcctgagggaggtaagagtagcaccgacttgctactgctaaagatatggactattggcctgggagggtaagcattttctgtctgatttaattaagaccactacctgctgacaaggctttgagaaagaaacaaaaataaggaatgcacaaataaaatgtaatgcaggtcaggcatggtggctgatgcctaagtgggaggcttaggcaggtaatcacttgaggccagaagtttgagaccaggctgggcagcacaccaagaccatctctctacaaaaaaaaaaaaaaaaatacaaattagccatgtgtggtgatggatgtctgttgtccagctagtcaggaggctgaggtgggagaatcccttgaggccagttcaaggttacaatgagctatgatcatgccactgcactccagcctgaacaacagaatgagaccctgtctcattcaattctttaaaaatctaatgcaaaaacattagaactgaaactagaaccagttttattggaagatgatggaaaagcaccttgtgatttatctcttttggtagcagagagctcatgatcgtccatctaactcccacaccatcttggagagccacagggtatcctacattatcctgctgaagatccttcagtacctaatggctctcgtgaagcattccaaagtgaaagtcatggagcctatgccactaaatcagatataactagatacatgttggattaaaaggaaaggaggaaaggcatakaagggaaaaacagagattattggagaccaaatacctctataaattctcaaaatttgtttaaaggctttactttttcaagatgcatattttggcaatagcttacgaagactgaagttttcttatttaatcttagagatactaatacttagaaaagaaaagtcttctatcttgttgaccttctctgtagccatttgaaatcttcattatcagaataatgcccctccatgtccacaattattaatttttatagatttagggggtacaagtgcagtttcattacatggatgtattgtgtaatggtgaagtctcggctttttgtgtagccatcacctgaatatagtgtacattgtacgcattaagtaattcctcatccctttcccacaacctccacccttctgagtctccagtgtctataattccactttctgtgtccacgtgtacacgttatttagcagccacttataagtgagaacatgcagtatttgactttctgtttctgagttattcatgaccagaattattattctaattattgtgaaataaaaattatgcctgactaaaatgactgaatccagaacttcaccataatccatctatctcctccgtgagtcagtgcatattacctattccaatgacctcttcagtactgtaaatattactgtgttccttttatttacttaataaatagatgtcaaatgtgtggaaaacaacatttgttttttcaaatacatgtttataacaccctttggaggaagtaagcctctagaacatgacagtctctggggtatgctattttcaggtaattttaaatgtcgctttccaacaaaaatgcaatactattatctttttttttaatgacaaagaaaagcaaaacaagtattatattggtgcaaaagtaatgcagtttctgccatttctcttaatgccattactcgtaagggcagaaatgaccattacttttgcatcaacctaatacctccagattttagatatttgagtgccattgcttgatatatcttttgttttttcttctggaaattttggttactttagttgcataaaggatgacttccattwtaccctgttaagcatctctgtctggtcagaagctactactctgttctttctagttcagtagggaacaatcagtttccttctcaattttcagctaatctttatgaatgaaatttgattaaatctagcaaaactatgcaaacatcataacagcatatggggagccttcctgtagtaccagtgggctatttccgtctaataacagattcaaaaaatccaattagacagtttgaaaaaagaaagccagagttaaaaatatctgactgtttgactgagaacagcagggaatggtttataggccaatcatttatggtgaataggatcttagtggtgagcaactcacatctctagcccattagaataatktgttactcatattgctcctaaagctttctacttaattataccaagttaaatagcagacattctcactcccttttgatggaaaatcacatttattcacccacacaataccatccttgggtgttaagggatgagagttgacctaatgggaagacaaacaaatggtttaggaaatgagacatgatttttttacacaaaggttaatgcacgagaaaagaaatgcctaggtctctgtctaatgtctatgtgttctcatcgaataattcttaaatgaccctatttagtttgattttctaactacattagaaatatatgaaacaattaagaaatcattttttacctgtcatatggcagatggactaacattgatcagggcagtcgaggaggttgtaaggaaatgggtactctcaaacattgctggtgggactatgaagtgttttaattttttttttttttttagacggaggtttgctcttgttgtccaggctggagtgaaatggcgtgatctcggctcactgcatcctctgcctcagcctcccgagtagctggaattacaggcaccctccaccatgcccagctaatttttgtattttcagtagagacagggtttcaccatgttggccaggctggtcttaaactcctaacctcaggtgatccgcccacgtcggcctcccaaagtgctgggattacaggcgtgaaccaccgggcccagccaagtgttttaatttttaaaaactatttgaccatatgaaaatatagatgttccattaaatatatatagcctaagaaatataatcagcaatgcagtaaaagattatgtrtacggatgctcctgacagttggatttacaatagggaaaagctggaaacaacctaaatatttgaaaaaagagaatggtaaatacatcaaaaatacaataaatacagtgttaagtgaaaagtttgtgcaattttgacttgagaaatttttaatgtactatgactacttggaagaatatggatgtacctcaaaataagtaatgatctatatgaaagactgtttttgataatttttgttttcttatacataccttccaatattgtccaaattttcaataataagcatgcatagcctaatatatcatgtagatgagtgcaaaatgaacacagagattaagatcatgggcttttcaatgaaggtctgagtttgaatcctgtctctgccatttactagcaatataatttcaggaaataacttaacatctctgctcttcagtttcctcatctgaaatataaggataataatggtatctgtgccttaaggatgaccaaagttatagatatcttaagaatgaattaaatgcgtttctctccatggactattttaacaatgaatgcctgacatagcaattatgttccataatcaccattatttatttataaaattatttagtattatttaatactaacattctggttttataaaaccaaattttaaaaatagataagtaaatgaaaggacaaggaaaacctaatttcactgtttttctagctttttttattgctataacttttatatcataaatccacccatttgaagtgtatagctccattttactatactgttttcatttataaaagccttttataaatttatacatacctttcagtgttgtttgaattttccatagcaagcattcatagcatagtatatcatgtagcagggtttaaaataagcatagaagagggtttcgccaaaagattatttaagaaaatctactaaaagagggttcttctgaaaaataaaatgtatttgcttttatcaaatgagcaaacttcatccacttggagatcacccacatgtgaatttctttctttctttctctctttcccttccttccttccttccttccttccttccttccttccttccttccttccttccttccttccttcttactttctttctctgatggtaagttacattagaggacaggaaggctcagtgatcagttttgatgggatggctgcacagaggcacatggagaagaagcaaggaagccaccttcagcttctgggtctctttgttatacaggaaaggaagtcaactggggtaaacctgtttggaaaggattgagtccttctctcaattttgaagggatgattttttagttcttcagatttatcttctgtaaataaatttcttcagaagcttcctgcaatatgataaacacaaatgattaggaagtgttttgtaaggattggggactaaagaaattattgatgaagccagaatgtgtcaaaaaggtgtcgtaaagcagcaatacttaaacattttggtctcagagtccctttacaatccaggacccaaagaggtttttttgtgtttgttttttgtttttttctaaaatgggttatacctatcatttttttcatattagaaattaaaactgagaaatgtttgaacacaggaatacccaagtacatattccagtgatcagcagagcaatggcatcatcacatcatattgcctccagaaaatcccactgacaatttgttgaagactaaaagggaaaaagccaaacaccttagtatgctgtaaaaayagctttcatctcacagacctcccgaaagggtcttgaagatccatgagcaatccctggaccacactttgagaaccgcttttgtaacgtgtgaccttcccttatcctctgccatgcraaactatctcagaatctaagattgtctacagccacggtacaaccagctctgagactttgaagagaagaaaagatgaacttcatcactaaaaaagccaaagtagttgaaagcaaacactagcygaattttcttcctccaagcctacagaccacctcacgtagtagctgtagtgggagctgctcccaagatttgataagaattagtaaagaggtttataagaccgtgtgtgcagagtctcacagttgctgatacttgttgggcttagctttatctctgtctacagtagcagcccaggacaaaacattcatatgatattctctctttcttctttaaccatagataaatgtcccaagaaaagggaagagaaacagaaaaatcatacatgctaaacaccagtttattaaatatatttgttgctgtttttcttttttacttggttgctcacaatattaatacaccctctttataaaacatgaaagcaatacaaaagtataatgagtaaaatgagaatcctaaaatgttttcttccataatcctctctctaatcgcatttctcagagataactgtgttagcattttggtgtgtttcttatagccctttttgttgtcaaaaataagcaaagataaaggggaaagattttgttctgtttcttttttctatatacacagtatatcttggagatagtttcaagtgccaaatacatgcatttatttttttcacagaatgcaagtcatgtcatagcatggaygaagttgggtttatttaatcattcactagttggcaggtatttaggttgtttacagtttttccattttagaaacagtgttcccatgtaaagaatgtcccttgtgcataaatcgttgtgacatgtgttggaatctcaaaagtggaattgctgagccaggggcatcctcattttaaaatttaatagacatcatcattatcctctagcatgcacatcactttacacaactgatggtaatttatgaggaattctatgtcccctcactccaacactgcatctagtcactctttgaaaattgtccagtctaatgggtgaattatggcatcttgctttgttatgcatttctgtgattaccagtgaacttgaacatctttccatatttttatttatgtttaacatcgaaacacgttacgttttgaatattttcctctactctattactgccttttatccttgattatagtttcttccatcacacagcaggcttgaatttttgtgtacttaaatttgccaatcttttcatttctggttcctgagtttttttgtttaacttaggaaccacctcctcccatactatctccaaggatagaaaaatactgttttctcctagagcttttgtgaactttattttttacaattatatctttagtccattgatggctgtgccttttaaataatgaaaagtccatatttaagttatttttttcccaaatagataaacatttgccttacaggatttagtaagcattttatcctttcttcctacatttgaattgccacctttaacacagggatattaggtaacttaagaggtaaatgtgtgtttcttgaatcccagatctaccacttaaaaattatgtaaggtttgatttactgattcatttttcctgccccaccaacttcatgaccataaaataggggcaggggagaaggaaatgataagacttagcatattataccatatggaaattaartaatacacataaaatacttaaaatagygtcaggcaatttaagagcactcagtaaagttagctcttattaaatttttgcaactccatgtatacctgggatctgtttctggtttgttcatggcagcattgtcaactaaaactttctgtgctattcagtgtgatagttattggacacaatgaccactgaaaacatggctagaatgatgggaaaattaaaattttaattaattttaatttaaagataaacagccacatgtggtcagtargtaccatattggacaggagaatgcccatatagtattttccatgagctttcatgagttatgctttattatataaaccagattttatttaagaactcatatggactagattatgaattttatgagatgattttccttgagtcatcaagaagaacacagtttttttctttaatctgttaaagttgggaagtattaatataaatctagttcctacttgaaatcaacattccagcaataaaccttattggttcttgttattctttgacctcacggttaaatttgatttgctaattttggttagagctcttctatattcatatttgagattattttaaatttgcattgtgcattgactgtgagatgagtattttgttggcttggtaaaatgaattaggagacttcatrttctaaattctgaaatagtttgaatattggagttattatctgttcttgggagatggtttttatcaccagttcccctaaactcctttttaccttgaggtaaagcaaagtctaccttactatttcttgtatggtgattggctattcaggttttctatctattattaagacaattttgaactcactggtgctccaaagaaaatctgaatcattctattacaaagatacaggctcacatatgttcactgcagcactcttcacaatagcaaagacatggaatttacccaaatacccatcattgatagactggataaagaaaatgtggtacatatacaccatggaatactatgcagccataaaaaggaagaagatcatatcctttgcagggacatggatggagctagaagctattatcctcagcaaactaacacaggaacagaaaaccaaacaccacatgttcttacttataaatgggggctgaaaaatgagagcacatggacacaggagggtaacaacacacactggggcctgtcggggagcatgggagggagaacatcagaataaatagctaatgcatgttgggcttaatacataggtgatgggtcgataggtgcagcaaaccaccatggcacatgtttacctatgtgacaaacctgcacatcttgcacatgtatcccggaacttaaaattttaaaaaaatttaaaaaaaaagaaaatctgaacttgggtagcaatatctctacctaatgatactcttgatttttaagtacttaaaatgagtctgaaactgtagaggaagaaaaattcttcctaccaccctcctcctttctctggctggggctttgtaaattggactgacaaagacagcttaacaagagagaagcaggagtttattagtgtgtgcattgggctcacacgtgggagcactcagacgtgagtaactccaagggctggtaagaccttgagctaatatagaatctcagcaaaggaacaataaatttttagagaaatgacaagacaaaggaacgaactttgagtttctagggtggcagactgtgggaaagcaaatatatgggaaacctattgtagataaagattagttagggaagtttatgtggatgcctgtggttccgtctctggactcctaagggtctagagttgtctctgatgattaacttttatccttcctagtagagaggggagggaaaacacctttgcaaatttgtgtcctgcttttaggcaaacaggggcagggcagagagcttttcttatagctgttttctctcaaaattctgtcttcacatcaaaataatcccaatgccaaagtggcgtattttggggtggcatattcggctaccctacaggacctatgcaaagatatatctttatatatatttaaaccatagttttcaacaaagttggaaacaagaataaggattgatttaaaagatattatatagccattgacatcatgctgcataaaacctatttaattctcatctaactggtagattatacaaataataacattgctttcctttggatattagcattggaaagagtgttttttgccagccttgatggtgcacccctgcagtcccagatacttgggaggctgaggtgggaggatcacttgatcccaggggttcgaggctgcagtgagctgtgattgcaccactgcattccatcctgggcaacaaagtgagacactgtcaatcaagaaagagaaaaagaaagagagagagagagagagaattctttttccttttctttcaaggaaaaatcagaaaatgagtggttgatcttagttcaattaaagaaaacaaaacaaacctgctgggtgcctcctctgctctaaatactaagcaagaaataaagtgaataagcccctgccagtcatgtaactaaactctgaatgagggaagtagctaaaatgttacacataaaagaaagctgaatgggaaaaatgcatggaaattatgagtttagggacattttcacttggccaaatgccccattctctttctctacttccaggtcattgtgataggtattttaaatgaacttgaataatcccttaggacagggttgcctgaggaaatgggggacacccagtcaaattggaatttcagataaacaacaaataatttttagcagaattgtgtcctatgcttacttatactaatatatatacatatattttatttgcctgaaattcatatttatctgcactatatctggaaacattaagaataaattgtaacatcttgtatttgtataaggcaacattttaccaatcttttcttcagaatactagttttatgaaactcagcaaaaagggctatgtggtcccaaaagttgagaaggcatttcgtgctatagctcctcttgcttacagctgttaacttggagtgataatcacctgttctgacaaccagcatagactggactccttctagctgttaacacctctgcagcaggactgagaaaggactggagagccacgtgctatggtttacacctctgagcatttgctgtgtgccagccatcacactacatgctttacatacttcatctcactaatcctcacacacttatgaggaaactactgagagtgtatgcatgaggaaatgcctcagagaggttcagcaacttgcccaaggtctcacagttgtaagggacagagtctgaatctattgcctctatacttaatcaataaagattcattatatgcattagctcatcaaaggttctaagatgtctagagtaaggaaaatttttgactttgtttaaataaccatttcctggaagcaccatcgaaaacattggtagttgcagggtrcagtggctcacacctgtaatcccagcaatttgggagaccaaggcaagaggataacttgagcccaggagttcaagccccatctggccaacatggtgaaaacccgtttctactaaaaatacaaaaactagccaggctggtggtgtgtgcctgtagtcccagctacttgggagtttgaggcaggagaattgcttgaacctgggaagcagaggttgcagtgagccgatatcatgccactgcactccagcctgggagacagagcaagactctgtctcaaaaaaaaaagaaaaataaaggkrgggtgttttatatttatatctacataaatctatacattatctagatattatactatattatggaaatgtatatattatattagaattaatatttctaattatcgtatacagttatacattttattgtgttattataacatattatatataatwggttctgtttttctgaagagccataaataatgcattcaatttagaagacaaactcttttagttggaatgagcctaataaaaataattaccatcccaagccaactttaggttattatttgtctctgacagtattaaattatcattatattaaattcctagaagcactatagaaatggcagcagagtatttatattatatataatataggttatattattagatattaatatattacattacaattgtattatcatgatattatatataaattggttctgtttctcttgacaaccttactaatacatccagtttagaacataaattctattagttggaatgagcctataaaaataattaccattccaaaccaactttaggttrtcatttgtctttgatattattaaattattattattttaagttcctaggagcacaatagaaatgctggcagagtgtttatattaaatataatataaattatatttttagatgtaaatatattactttatgatgacattattgtgatatatatataatataatgagttctttttccctggagaaccttaactaatacatctagttcagaacataattctattagttagagccagcctaacaaaaataattaccttcccaaaccaactttagattatcatttgttttcaaggccatggttctcagccttagttgctcattaaaaatattcggggagggcaggcatgatggctcacacctgtaatccctgcactttgggagaccaaggcgggaggatctcttgagatcaggagttcaagaccagcctggccaacatggtgaaaccccgtctctactaaaaatataaaaattagccgggcgtggtggcacatgtctgtaatcccagctattttggaggctgaggcaggagaaccacttgaacctgggaggcagaggttgcagtaagccaagatcgagccactgaaaccccagcctgggtaagagagtgagaccctgtctcaaaaaaaaaaaaaaaaaaaaaaaaaaaaaaatacttggtgcacttatgaaagcctgcagagcccagaaattctgatttaattgatctaagaaaagggagaggtaaaagctcccaggaaagtctagtgcccagccaaaggccatgggagtgatgagtgaccctgcccacacctaacggagcgtcccctgctctgctagtcagtcaacagaacaccagccaatttctctaagccaagagctggttatttccaacctcccctggaagagtttacttaataccataagaagtmattttctcttccatctactgcaagaaaaaactggatattgcaattgccatcctttttgagttaaaatactctacatttttaaacaaataaataaaaaagcttaaccattttgaaattaccagtagggaagaaatcgggtgaaaaaggagaggaaccatgcattactgagaatactcctgtcccaaatctctctccatatccatttcttaaatttattcattcattttaaaaactcaacttacaattcttgaaatctttacctaggatatgtcagccagtattctagacatctggtatacatcatagaacaaaacagtcctgcccccatgaagtttcattctagcttacccctagtatatgccaggctctgaactaagtctaaaacagatgatccctgcccttccagctccctgcaaagccagcattaataataggagggctttttacagaaaatgaaactgtgacttgtttaagttacaacctgtgagtgttgaagtcagagtaccagtctttcctgtataccttaccacctatttgaaaaatgatggatagttatcttaaacggtgaagaattagtgtaagttcttaaacaaaatagtggcgatattaagatcatgcttgagaaacctaattcttgctgtctccttacatattttaagtttggcctaactctgtctctgtgcatagtgagctgtaatgtaactggatgtgtaaayagattgtagcctactcttgtgccaatctccaagttttggccaatcaaaggtggccaaccattcaaaccatgttcaagtaaggcaaacatcaagctgtaaccaacccaactatttttgtaccttgcttccattttccatatgtcacttttctttttctgttcataaattctctcctaccacgtggcatcacgggggtgctctgaacctcttctggttctggggctgatccattcatgactcattctttgctcaattaaagtctgataatttaatttgtctaaagttttccttttaacacgaccaagagtcacagaytgcttagtctggagaagctactcttggctctatgcagtccacaaaaaatgacatttagaaatggttttccttccctggtctccagagaagcagcggctttcatactctgaaatgcagcatcctcatctgtaagatgcaggtgctaaatgatgactgttgttctttcaaatgttaactttctatgagtcacttcttcattgtatgtgtcaagaagcacaacctcgaaagcctgcctttgacaatgcttagaggttagaggatgccaaatgagcctcatcttctttggctactgagttartaaccatccttcatttatctcagggagcaaaggcaggatttccgtgggtgtccaaggtccttactcacagtcaggatgcatggcagtacccttaataactacagattcagaatcacagaagacatttaccgartatgtattttctgccaaaccctgtgccaggtgttattagaacattacttatgaaatatttggtagtgtggatgaagaggcagcttttcctgcttacacaatacagaaatatgatttcaaaaatctattaaaattttattaatctcagaaggcatgatttctaattgtgtttgatcttacacttgttatgatttaggaattcacatctgagttggttgcatgatgctatagttggcaacaygattctgaccgccaccatcacaaatagaggttagaaaatattacttatgtgaaaataaatgccatttctggcacctaaaacagctcttttctcaccttcctatgatgaggttttattgagcttttgcaggaaagaaaagaaagaaatctgcattcaggtttcaggagtaaagaggctgctcattaacaaagccgtttcaaaatctattgaaatgctccaccacgaatacatgccctattactaaaatcactgtcatttctatgcttttcttctcccttcaatcacataccacccagttttcagttcctataattgccaaaagccatttatgaatctgccttattgtatgggttacaaacgtctattttcctgctctgttcatacacatttgggagcaccttaagatgctgaaacactgrcaaatgcttaatatatttcatttgaaagaattatgatctaaatcttaaagaaacagtgagtaaagtgcagtttctgctgcttggttactgtagttcattcggggaatttcatcttggtcgtgttgaatgcagtggttagatcctgtgaagttgtttaattaaaggtgttctagtagtcaaagccatgtctaaaaccccgtttgtttaattctttagtaatgtcaacattcctaaatttcatgtagcctaagagatttttccactggcttcaaatctgagctttgccactttggtgtcctttgctatgaatgttcaatgaggcgttctgagatcaccaagaatagaagagacacacccccggctgtcagaagtttaaccttggagaatgccatgaagggcaattctggaagaaaaaagagaagggaattcctcgtaggtttaagatcagaaagtggggaaggcgggggtgctcttaaatgcatcagccctactgccagcacagtggggactattaacacatcatattttttttttcctgcagttactcaaccttgcagtgggacaagttgctcaatgacttaccaggagacaattgttatttttaaaaatgtctttcttattttaactacaaggacttggcttgcttagaggctcttgctcaggagtctttaaatgcaaatgagggaaaccccaggttataaagcatctgcttctgcaggttttcaatcctgttaccttagcaacatttgcccttgtattccacgcatcaccttgacagcctgcataatataagggacggagcggagcaggggctcggggtgggagcctggaaagaaaactggggctcaaggaggtttaatatcggttagtagcttgggatccttcggataacggctgggcaatgaaaataaaaagccccatttccagaaatcaaagaacttggggagaaataaacacgctggttcaaaggaggggaaaatatatcagaactagtcggacctaagggagcagatattttccaaaaatatccttcccaccagccatgctgcagatgtgtcactgtggctcagaggcaggccatctgctgcagtgtttccctggaaacccccagcaacgcccctcccggagctcctccgcggtctcccccactccatccccgcgcagcggaggagcttgccggtgatgtcactgctgctagctgggagggaatcccaggacctgcgtccctcgggtagagccaatcatggtcggctctggatgctggaaacctggggcttttaaccagaaagaattgcaaaagcaatatgcaattcatcacagtccacaaagcacagttcctaacagattctgaaaacgtgattttaaaaaaaatgagatttatccgtaaacgagggctaggctacagttggtagggcggctgtcaattcttctacggagttttaacctacactcaatggatgcatgaaaaaaagaaatgaaatgatttttttagctactttaaaaaataaaggtaatgaatatttcttatctatatgcatatatatatatatttcattataattgttgcttctgcagaaaattgggatagaaatctcagatgagctgtagttacacggagatctacagcaatgcaatgtttagctagcatgcattttgtcatccaaggctagtaggtgaaatatttcctttacctgtcttgatgcacggtggagaaakgagacccgcttcgttttccctctaatctagagagttaacctcctccaggtagggttgaaaatatgaacagagctgcttttgcaagactgtgttgcctctaaatgtgatttaactcgcatattcagaatcttagcaaaaataaataaataaatagtaagatggggtaaggcaaatacatagatattttggagatcttatcccttattcaaggactgtagattattacagctttgttgtcatattatytctaggcagtaaatcatagtaaagtagtaaattcatagggaatgaattaatctcctttttgttttgttttctctgaaaaagagggtgtgattacagcatatattgattgggtactgattatgggacattttcattgtatttgttgttgttgcagtagactaaatgtcgagcccgtgaatctcttgtgttggcattgtcagaaaaaagttgtattttttttaaactggtctaaaaggaaaaaaattgaacatatatctttatattttttttgctctcttctcaaccatgtttagtgttttgtttatattcaaaggattttattttcacacttacaattctttacttgtctgtcattcaaatctttgttaccaaaacagtttgctctttttcatcattcactaagcattcctttcacagctaagctaaagtgtctatatggaaacatacatayacacacacacacacacacacacacacacatgcacacacactttttccaggccacagacaggaagatatgtgtaaatgtatacatgttttcagtagcatatatacacaagggtctccaataagatttttctagaaacaaaggctgatactacttcatttcatattattgtaaagtgctaattctaagtaaaagtagactaaaaaagagataaaaataaagataaaaatgagtgggctctcacaaccttgtttttttctttttgtttttcacttactctcttggctttttaactccttccttctctgcctcttatgaatgacaccaggaagagttattgtaaacaattggaatttctaaagttctgtgtaactgttagtatattcactatatgcatggtataatttataaaattaatctttgaaactgttaacccctagaaacagaaagaaagaaagaaaaaaagaaagaaacataaagaaatcttgacccactataaatcctgttttctctgccatctcccccagttacacccagggcaagtctatcttcttcaaagacattcagtcagcccacagctttttatcttttcaaacctttaatggcaccattagctacggaaccttgatttccttaatttttcccccactgtcactgcaaccatcacatgtggctctcagagcttctagttccctggaaacaggakttctatctgccatcaccaggtataaggtgccaccacttgaagggatctgccctatcaaaaatgaggaaatatattgatcaaaatggctggagaaagtgaccagccaaaacacagcttcacagtcttgcctgttttaagtagattctatttccattttgccggtgacagcactaagcaaataagcaatgttgccaatccgagaacagcctgcattcaaggtattcaatcaatcaaagagagacaatggcattctctcaaagatcagatgttttgtagtgcaactatgttgttctgtttttctttacttcaattatcagatagacaggaaaaaatacaacaaaatagcatgtagttgatttgccaaaaataaatagcaaagaaaaaacaagaataactagaaaacacgtgacaattttagaaaaaatgtaatcacatttccaattactagacaagatataaataaagagcatttataaaatgtttaaatccattcttttaaaacgataaacaacttctctaactggaaattactgtgcagctgctactttgtattttattggtataaaataactttagagttctatttcattgcattgcaaaggtgtaatactttgccataattaggtttaaatcttgcaaaaatagaaacctgcattttttggttttatattagtttttttaggtgatgctattcaatgggaggatataattgctgtttctatgaccttgggtaagtcatttaacccctctgaaccttggtttccttctttggttgaaaatagagacagtaatacttgacctctctctccagattttgatcaggttaaagaggccaataaaaatgaatgtgattttgtaaatagtgatacacacatctgatgcactgttgtgtatttttgcacctcctcagcagtgctctagctagtctgtccttgtccttgtcaactgtacgtgaacatgatgccctctagtgactgcactttgtagatgctgtaggccccaaggaagccttgagaggaaaaaagagcttaatgaagttagagaagggaagggaggcccgtagcggaaaattatgggttataaaccaataaaagcagcaggaaaaataagcagcagctgactatgagtaagaggacaagatgcacaaagagggagaagagaaaataagcagaatagagagagaggtgagatgtagctgattttggaagagttcactgtggcctggaaggagaggaacaggaatctctgcccagctttgtttataaccggcagtaggtccttccgttcatgtaagctctgccctccacaactcaccctgtgactgcaaaatgagatagttaaaattaaggttcagaattctttgagtcaatgtaagaagatgagcgaaaagtacaatgaaaatgagaactgaaggaggaagagtctgtggaagcaatttccagaatcttgtttactgtgtctaaggtcacctcagtattgcagtaacttaataacaaccaagcggctgaatgaggcaagctcaggtggggtttggtcgatcgcaggatgatcctgtactcttgtagtaacaggagtgttttgcagtacagctccacccttcacaaggatccagcccctgtgagattgcatcctcttagactgaatgcctaggagtctcactgactacctgtctgaagagctccttcttcttttctgaattaatccttctttacttagaactatctgaggatcaagtgatcttccagtgggaggatatttaaacccagcttccccttgcaaattacagatgctataatcctgtctgcattaggcttaggtcatgctttctctaaacgaactgtgtattacaggaaagtaatcaaagtccacaagaactgtgtaattaaaccagtgatggtgcaaataatccagaagtctgtcattgctctctctagacaaaggatcactcaaagatgagaatttgaactaattttactgaaagacaggatgatgcagctgaatggaaagaacactgcataggggtcagaaggtgtggattttcattctgacatggacatttgctatctgcctgatcttctgcaatattctaaacttaacaaagccttatctatacaatgggaattaatccatttattcatatatattaaagattttcaatgtgccaggcactgtgttaaacttccagatggcagtgagaaacaaactctagaatttctgagtcatgataaagatgaaacaggtgttatattttaaaactcgaaatgtcataacagtgtaaggtactatgcattcctaaagcaacataaaacaatagggatttttccaaccttaaagagcagcatttaaaattgagtcttgccttgggagcctgtgacccacgggagcattggaaatgacatcaaccacgaagtcttttttcttccagtgaaatgcaaaacctgctacctccctggagctattagcttggccaaatagtcctctagttagtaagtggacaaagtagttactgcacggctaactgcaactcttcatttaaatatttccctcatgtccagataggatatgtctaatatcatatgcctaatagcttttcagcatctttccacacagaaagaaagggaaataagccttgtcatagccatgaagtgtccccaccaccagagtttcttctctgctacccctatgctgcctaggaatgctaaaactattttatggggccaccaggtggcagttagggcaaatggttttagtttttttctttctacattcttggggaagaccaggggcttaggaatggagaagcaagccttggaaataaaagcattatggagcatttgggggtgccaggccctgtgctatatgtgatatatgcaatacctcacccaatccttatatcaatatctgttaaatatactattgaacaggtgaagatagagtaatatgggaaataaaacatcttccgtaataagcagctagaaagtaccacaatgtaaattcaactgcagaagacatgacaccacagggaaatttcgtttcactgcagcagtgtctaaaaactgaagatggggaaagtgtagagtgtgttattaaaatgattttttcaaaaggttttaagagtctaaataaattgcataattagtcagtttcctwcctcctagtcttcctacctttagtctttatttttagctctcctgagtttgtagttgttctccttccatggtttgattctctccttagctttcagattctatacatttcacttctctttataaataatttttaaaaattcttcatgtgaacctgttcaagaacctgttgcattgaggactgaagatatggctctagattccttactgtttccggtagagaatctgcagagagaatatttcactgaagcaaaattataaatggaacatttgactttatatttccatgtccccaaagatttactaaacattagatctgatttggccaactttttctaccaatatttccggctcttgatatgaaactagttaaagctattttttcccttcaatcagcacattttcaaacttagaacatctattactcaaatttggcataaaattatgcagccagctcattatccactttctgcatattgccaagggctcgctacgtatgtgtgttctggttggcagacattttgggtaactactattctcaatttgtacctactttatttcaatacatgtttcaagatgagtgttaaagggtacattgctttaggaaacttgtctttttctggcatttgaacttgcctaaattagaaaaaaaaattctggttcyagtcctttttttctaaaaaaatattccaaatcattagatgaaactgttaaagataacgtttggaaagtttgtctcctcttyggtgattaaaaagtgctttccatttttggcccatggctcttttcctggggcatagcatttgattataaagcttttctgatgaaagtatcacaggayagcaaacatgagaatgggagaaataattttgcatgcaattttttgtcatctggctgcactgtatgggaaatacattttccctgtcaaaatgtcaagttgttttgacttcacaacaaaagaggaaggaagttcttaaatgtagaacaataactcagctcactgctgatttctatttgttctatccttacatcacagtatagagatagaatgtgtcctacaaatgtccatgcagcaactcatattcacttggcataattttgtttattgtttgagaaagtagtattttgggtaaaaattctgaaacaggcagtgagtatgtctgagtatttctggcaagggctatttcttcctttctccttttactctggagttttcttgaactgagctgtttggacaaatgacacatatttcaagaattccaactgtgggagtgtttcactcacaggattktgctttcttctaagagccaggtctggtgaacactctcaggagctttgtaacatgttccaagctatgcagaagtgcttagttcattcactagtcaaagactaacacatttacagcaataaaatgcattataagcattctttcttcatgaatctattcatcccattaaaaaagcaggaattccaattaagtgaggtaaaatatgctaagtagtacagtataagatttttaaaaattacaccatgtttttcatggattattttaagaaaaaaactattttaagaaaaaactgtcctatttttggaaggtctagtcccaaactgcacaggaaagttagaggtaaactgttaaagtctttgagaactggcatttttcaagccrcagtgaatgaaatcaagcattyctctgtttctcctttcctttcggaatttcttttcctgaggcttgagaaggcaatactggtcttacttttcacatgagtyaagtttatactagctgagcaccctgaatcattaacgtctttctccccaggggagaccaagctcaaatccatcatcagaatacatacttagaccctctcccttctttctggccccctgcttcttaggaatgtgctctaaccaccacagcattcctgatcaccacctccagatgacaaaaagaaaaaatgagtggcagtgaaccagaagagcttaggccatctattttatcctaaaatctgttcagaaatacgaggtttgtatcaattagtaagcacactgggaatacaggtatacaagttgttagcaatatttggttatataatgtctatagatayttattttgctttctctcagatattaagaattatgtctttcctttaacctccatcatttgtttttctactttggtggaagctttttgtttgtwtctttactgcaacagtgaatttatccttggatttctccattatgattggcagtatttatacaataatttcttggtattagttaattgataccttatatttactattttcccccaaagctgagtaaagaatagaatgaaatggcctatacttatcagtgtaaatggatattagaattgctgctcttattccaaaaaatakcactyaaagttcacaaatgaaagttaataactgaattttagtaacaacaacttcaacttaaaaaattccatgtaattaatagctcatgagtcccactgagataggttgaacttcataacttctaaagccttttatgtttctactacttttcagttctaatgttcaatagtagcgtgagtatctggttagtttcagtataaaaaagatgatacccacttgtgatatgattctactttcaatgtcacggtggaatcatttattagttttttaatttaatttttcacatgtgagtgtgatacagaacacctgatttttctacactataggatgtcagttcagtaaatcgattttcctcattagcaactgcttatcaatgactatgctgtatagaaagcaagagtattatactctatttttgatcacagataattgaagtaaatttaattagatccatatgaaagaaataagaactctcacaattgtgacatatatacgtgtctgtgcatatgtcatatcttagtatatgaggtatttgcatgtgcatacttaccaagttaaacgacctcctatcccacaaagttctctttagaaataaacttgagtctcttgtttgtgaaaccaaagagaatttcccgccaaagaaatacctacaaagaagtgtaggtaaagaattcaaatgattgactcaggcttaagatgatttgatagctctttctgcaccaagaaacacagaaaatctcaaagcaggcctgtgccaacttggtataaaaaaagccttcctaaagagtgcattatcttcaatgggaaacgtcgcagtacaccttggcatcaccaggtcaattagtgcaccggaaagatgcatgatatttcctgttggcagccacgaagtgagagaattggacggctactagccctgttgtgtgccaaggcctaaaaatcatgcaaggaggtgaaatgatgcgtgccaagaaaatagcaaccacaggaaacagcaaataatgtaaggttttgtgtctttactctagatgtaaatactcatttaccagggcagctttaaattgacagcttttgggtttgtgaggatattgtgagtcagggttctcctgattgggcaagatgaacgagtgaacaacatcactagggggccggagtagatgagatactcactcattcgtgtgcctgctttagcaccagcagtgtgggaatggggagaaggccaatggtctcaaggcagtttccagctctctggcaaacaagataaggccatggctgtaacagacaccctctgccaggttctaaaatctctctcttatgacctttttaagatctttaaagcaccgtctgcccttggccaacaaaagagaaaaaacagagtcaatgcggaaaacgctgccaagacaacattttcttcttaagatcctaaaagcaccattttccctttgctaacaagacaggagcaataaagagtcaattaggaatatgttgccaagacattggccatataatttctactccagtcggttttgggtttgatgcagtttagaattctctagacacattttttcatttttttttcttactagaacgcagaatgtttttgagagtagaggtggatggcactgctcattagaaatagctgtcctgccccagaacaatcttcaagacaaaggttgcaagactatctttgaccttcctgtccctaaacactccccaaccccaagccaaacacgcgcctaaaagttttcacaccttgccctttactaacagcaatcatatttaggaggaatatattattgttagtcaggaaaytctacctggcttcaggaggtagcttagtgggtatttgctaagtctgatacctttcctttcaacatttagctgagattacctatactaagagcacgaactacaactgtggaaaacagaagaaaggagaatgttctccaaatcaaagtgtgctaaggtcagcttggggcagccaacaattcctggaaggtgacagagataaagttgcagagagggaaatggttgaagacaaatgtctcacgccttaaaatgttgctaaagtaagatggctgtttggatgagtcatcaacaagaacatcacctttgctctcttcctgccacccctgcacttctcaggctactgctcctaaaacctagaactcaggagtgatggaaatagagggcacccatggcaaggaagaaattggagagtaggaaactcagggaagttaatcctgaggaaagtggaaagtgactaaaacattttgagcagagaaaagtcaataaatcaaatatagaaacaagagatgataggaggttctcataacagtccaaatgagaggaccaaaaggcctggagtcacgtcattgcagtaaaatggaagaaaaaacaagagtataaatgaagtgtcaaagatgttaagaaacaggatcttttaaaaaattatttttaattattatgggtacataataagtgtatatatacatggggtacatgtgaaattttgatacatacaatgtataataatcttatcggggcaattggggtgtccatcacctcaggcatttatcatgtcttrtattagaaacagtccaattctcctcttttagctatttgaaaatatacaataaattattgttgagtatcatcactctgttgtgctatcaaatactagatcttattctttctatctaactatgcttttgcacccattaaccatccccaccttctccccatgctggctatccttcctagcctctggaaaccatcattctattatctatctccatgaattcactaggagaaataggatttttgactaatgggtcagaagaagcaaaggaaaggaaaggaaaggaataaagaatgactcaggtttcttgcctaggaaattggttaaaaaaagggtatttttaattaaaaaaggagagttgaataggagactaatttgaaggagaaaatagcctatttttagatgtattaaatttatcaaatttgtgtgctgtatatcagggctcaatcacaattctggcataaatttatatattttatagaacattattaacttgaaagaaatgcatgtattttgttaattgatagaaacaagatcaaagggcatattatattattattccgctttgtaaggaaaaataggttttgcatatttatataaaaagggaaattgaatgtgatatactctggggtattaataataattgtgaattaaattcctttctttagtttatattgctrtctcaaatcttctgatttttctaccttgaatgtaaattttttgtttgtaatatggcactttaaattaaagttgtttttcagctgggcacagtggctcacacctgtaatcctagcactttgggagaccaaggtgggtggattacctgaggtcaggagttcaagaccagcctgaccaatatggtaaactccttctctactaaaaatacaagcaaattagctgagtgtggtggcatgcgcctgcagtctcagcaactcgggaggctgagacagaattgaattcgagaggcggaggctgcagtgagccgagatcataccactgccctccagcctgggcaacagatcaggactccatctcaaaaaaaaaaaaaaattaaattaaagttatttttcttttcttccattacccagactggagtgcagtggcatgatcacagctcactgcagcctcaacctcctgngctcaagtaatcctcccacctcagctttccaagtaactaggactacagatgcacaccaccatgcctggttaatttttgtaatttttgtagagatgaggttttgccatgttgcccaagttggtctcaaactcctgacctcaagtgatcctcccayctcagcctcccaaagtgctgggattacaggtgtgagccactgcactaggccttaaaatttatttttcaaaaacttgatgattcaaatcattgaagatgctcttatgccaaagaaaaggtagttctaggaagttcatggaatcttacaaacacctttacagctcaacagaattgcaaagatgggtagtgttttgttttgttttgtttctctgattgttctacagcttatagatactgaggttacattttatgaaacaaaagtaagaatacatgatttaaaagtaagatcaattcctaaaaattggacctgaaaattttatggatagagtagatagacgtgtagaattcatcccagcatagagttgctgggatattactggtgcttcttcacagggaaagaaacctggctacccagactacaaagggaaagggggaaaatggcctataactcatatcaggtgaattagcaaacattctcatttcagacgatttttgctgtccctggtcatgaaatttccttaactgggttctatcttttactttttatcccaggcttttagcaagggtcataggaaaatggccatttccacatatctggtatatcccatttgaagatattgcctaacaaacattactcaggatcccttrcataaaaacctccatgataaatttcttctgtacttttttccccaaaaagctggattctcctgtaaaactgttatctattctctttatatattataattatggaattcattatcatttctactcttatctacatgactaggtcaccaacagctaattatatagctaattcatggtagttaattttatttacttctcttaagtcatgacttacaaaattgcatttctatgtatgccatcttattacctccatttatttaagttgcatactacttcacatttcctttgaagtgtatattattattagtagtagtagtattttggagacagggtctcactctgttgcccakgctggagtgcagtggtgcaattatggctcactgcagcctcaaccttccaggctcaagctgttcacctacttcagcctccccagtagctgggactacaggtgtgtgccaccatgcttggctaattttttaaaaatttcctatttcttgtagagatagagtcttactatattgcctaggctggtcttgaactcctggacacaagcaatcctcccacctcctcctcccaaaatgttatagacgtgagctaccacacccagccatgagtgtacattataaataaataccaataatgtactttcacatatgaaaaggctataaaagtatgcaaatatattatggcaacatctgttaagggataaagtgacacactgttgctcataactcgaaagaatatatatatatatatatatatatatatttttttttttttttcttttgaaacggtgtctcactctgtcaccaggctggagtgcagtggtgcgatctcagatcactgcaacctccgcctcctgggttcaagtgattctcctgcctcagcctcctgagtagctgggactacaggcatgagccaacatgcccagctaattttcatatttttagtagagatagggtttcaccatgttggccaggttggcctcgatctcttgatctcgtgatccacccccccatcagcctcccaaagtgctgggattacaggtgtgagccattgcatccagcctcaraagaatagtataaaccttatgtgttcatataagcagtagaacctatccctaatagttggattttattgtgtaagtgtttcattaaggaatgtctgaaacatgtccagatttttatttcagtggcttagttttgccacagaacttcagttttataaatgtgtgtactggcttaactgtgaaagtattaaaattattgtattgatttttgcttgcaaatgaaattcataaacagaattatcactgaaatttacatgcaagagaaattgatcaagatgatttgaaaacttatggaaagattgaaggttgccaaaatctttctctttctaacttcctacctttatgtacatttacactctaatcacaggtatttacaggccttaattttaacgaaaatgaagaaaaccaagaaagaaacagctctttagagcaatggaaaatcttctatgatttctcactgacattggctagatactctgcatttatgagcaatcatgcatgtatatcatcagatttaaccttcacaacaattccatatatattatcagatttaatcctcataatagtttgctatcctaggttttagtttagaaaactgagcctcccataagctaagaagttacttgtccaatatcacaactttagataatggtagacttagattaaatccatatttgctcgctctacattccatattcttcccatttaattgaacaagattttggaataaagttgaaatccacaaaaggaataggacagtgacttcacaataaaaatattaaatgtggcagaaagtatggatgtcaatggaatgtaaattctgggcctcctcaaaaacttgatatactcatcctgtgttagttgtgaaataaacaggttggagagtgaggaaatgtggtttttgttcccagagtcattactgaccaactgtgtgctttgatattatatttgctttctgatactaattatattaattctcgctcatagaaatcttccctccttcataccccacctctgtttgattcttaatctcatacataagaggtttttattcaatgtctcatttttctttccaggacaagtatgttgtaagaattaattartagtcttagaaccattcaagcagtaggttctaattgagtatttttctccccggttagcacagcaccctgtcagagccctcaaagtcagacaaagaaggatgaaacatgttttggtccttaataaagaactgctgattgactgtttgaaaaacaaatgccgcacacctgtaatcccagtgctttgggaggccaaggcaggaggattgcttgagcctaggagtttgagaccagcctgggcaatatgatgaaacctaatctctacaaaaaaaaaaaaaaaaaaaaaaaaaaaagagccgggcatgaacctgtagtttcagctacttgggagactgaggtgggaggatcgcttgaaccctagaggcagagttacattgagctgagattatgccattgcactctaccctagggtgcaagattctgtctccaaaaaatgaaaaacagctgtatggtttggagagccagtggctgacaaactgaaggtcatggctaacagagtctccatatcagtgaatctcaaacatctgtttacataaatagcatcttcttataaaaaaatacaaattctgagcccccatcccattatagttggtaagtctaggatgagaccagaaggggtcattttaatgagattttcagatgactttgaatttatatttaatatttattctggtttgcctggggttgaagggttccccagggcatgagactttcagtcttaggcaaactggaatagttggtcactcagatttcggtgcagtggttaaagttaacactttcaaaaatattgtagtgatctagatttggttctaggagtttggctcaattcagggctaacaaaaaaatctgtttagggccacttggggattagtgattctcaaaaggtagtccttgaatcacttactgaatacctatagttgaagaacagataactgcattttaacaagattcaaaggcaaattaatgtttgatgaccgttgacatcaagtctcagaatcagaactgttyaacttccaagcaaatgaaattactaaactcacttctctgagtgaggctgagagcaagaagttaagtataatgttttttgagctaaaatacagagtctactatcagaatcctgtttcccaccataaggattaagatttttttgtttttgtgtgtgtatgtgtgtgtgtgtgtgtgaatgtgtgtgtgtgtgtttgttttttgtttttctgaagtgaatgacatcgttttttggaatgaaaaggtcttgccccaccctgcaagtgtatctctgcctttgagacaatttagccctggaatcaaacctgggggggaaaatcaaattatgatattaaagaaaacgctgacaaatttctaaattcctttcctctactccctgctgcatacaacttccttctttctatctataaatactatatctgctctagaaacgtgaaaaataacataaatattgaacagagtgtgaaggaatttaaactttattgatgagtagtagtattacccttctggactgatgcagatgagagcaccataaagacaaagtgagttcttttggtccttaagccaygaattggagtctggatagtagggatggaaatgggttattagatcatcagttcactttcctctccaagcagcaattaaatttgttttctttgtctcagcttactcgttgctcaaaaaaaagaaacatttcagctcctcttcatggggaataagaccaaacatagaacacttttctcttaacatgtgtggtgcttgagaggagaaagaggcaggaaggaaatgcaggagaaatgtgggaatcacagttaacctgaaggattactttggctgtccccttcagctaatgtgaacattctggcagtcagatgcagccctgtgagaaacatctatcagacatcctaagtagatgctccaactgctgtttttcatgtacagctgactccaagatgagtgtgatgctatcacggtgcaggataacagagatgtaccgcgaacccaacactcaagatgggaatgataaaacttcaataacaaaaacaaaaaaacaaaacaagccacactatcctttcagccttcagggatcgcctccttaaactgttttctaaaatctttctgcactttatatcaggtrcaggagaagtagactacatacattatttgttgtctatctttgaaaggatttcattccctctactgcacttaatcattcccttatctgaatattaactcagtgtaaagcttcccaaattttccaagttcttgaaagagagcaaaacatattgcaaagctctatatgtttcctgctagatatatttcgtgaaagacttcattatgtccactttcttttgagtttttgtgttagccctgcattgctataatttccaacatcccctggaacataatgaaaaccagagaattgctttttttttctgggtccattttattacattcttttacatctcttacttaactacttctaatgcctttgctctgaaactttgtgcatttgagggtttttttttccccgtgatttggtggactgcaagggcacacaaaactagcttatttttcctagtcaggcagttttgaatagaaggtgattgtgttttccagagataagtatgtaagtcttttctgctaccggaggaggattctattttagtagtctattaagtagacaataagcrctgagttatgagttgataagtggatctgcttaccacctagaaacatcaattgaaaccacagcttatggtttcttactgcctctttttggtttctcactgagtctttctggttattgttatcatttcgtttttgacttgggcttggactgttcagcttggctgtgttaatttttcagaatcaatgacttttatagttacttccatgagtttttcctcctgcattttatttaagcaattcactaactatttataagaccatctttgaaagcctgagatacatatctaggcaaatatccatggaaaaaataaacactctgcaaatttgcaaacaaatacagcaattgccaaagtagggttatcttttgcaatcagtactgtggtttcagtttgaaaaaataaagctttcttrtcagttttgctccaagggctatctgattcggtgtgtagtcggtgaggaaataaatacaggtataataatctgtgcttgctcaaaaattaaaaaatcctttaggagggggccaggcgtggtggctcatgcctgtaatcccagcaatttgggaagcagaggcagacagtttacctgaggtcaggagttcttgagaccagcctggccaaaatggtgaaaccctgtctctactaaaaatcttagctgggcttggtgacatgcacctatagtcccagctacttgggaggctggggcaggagaatcgcttgaacatggcggagattgcagtgagccaagattgtccagcctggacaatagagactctttctcaaaaagaaaaaaaaaaaaaaacctttaggaaggataaaactcatttcctctatcagcatagtgtcaccatattacagaagtatcaaggtcaagtattaagactactgaggctcaggtgtccttggctgaagggagagagaggataccattcttgcatagtcttcagggcagcagtaatcagcaaactgataggttgcttctgggtctaaacccactgtaatcatttgcttgtagagatgacaaagttatcagttgtacttacatccactttttttgttgtttcagaagcttaccacacttctcccagtttccttttaattagtttgtaattttaaatcattacattaagataagaggtttttattaaatttggtagaactcatggtaggtcctacagaaatcactgaacttggcagccaaaaacagtgaccaggctgaggatgtgcctgaattgaacagggagatgctatttacttcttaacagagacatacttttcacgcagaaacttggcaactggaggagaaaaacacagaggtgaaggggaaagaagactattctggaaattaacaggtttcaattttggttgttcttcaacttgttagctatgtggccagaaataagcctcttaaactctctattccttggtttcttcacccactactctaaatctgatgaaacagagcagtaagaatttcttaggatatagcttaatttatttttttttaaaaagctcaatctaaaaacaagcttaatttaaaacagagacaaacaaatatgcctaactttgagttttgacaaaaaatgcaaaagtaattcaatggaggaaagatgagctttaaaaaaaaaaaagtgatactggagcaattggatatccaaaggcaaaaaaaaaaagtgcctaaattcatttctcacatcttatacagaaattaactcaaaattgattacagacttaaacataaaatgttaagcaataaaactttaggaaacaaacaggagaaaatgatgaggacctaaagctakgtgaagaacttctagacttgatactaaaagtatgattttcattttaaatgaattttaaaatgaatttcaatgaattttaaaattcattttaatcaactgggacctcatcaaaattaaaacttttgttctgtaagagaccctgtgtaaagaattaaaagaaamactacagagcaggagaaaacatttgccaaccacatattcaagaaagattttgtacctagagagtataaagaactctcaaaactccacagtaaaatccaaacgatccaattaggaaaatgggcaagaaacataaacagaaattttaccaaagatgatatacagatggaaaataagcacatgaaaagatgttcaatatcattagccattaggaatatgcaaattaaamcaatgagatagcactatctacctatcaggatggctaaagtaaaaaagagtaataataccaattgctggagaggatgtggagaaactggatcactcatacattgttgatggaaatgtaaaatggtacactctgtaaacaatttgcttgcttcttataaaactaaacatgtatttaccatatgattcagcagttgtgctcttggacatttatcccagagaagtaaaaacttagactcagtaaaaacctgtacatgaatattaatagctgttttatttgtaaaagccccaaactggaaacaacccaaatatccttagatcagtgactggttaaacaaactgtagcacagctatactatgacatactatgaagcaataaaaaaggaatgagctattgatacagacaaaaccatggatgaatttcaagggaattgtgctaactaaaaataagccaatcacaaaagatttcatgtgatgtgattttatttatataatattcttgaaatgacaaaaatatagaaatggagaacagattagtagtttccaggggtcagagagtagaggagggagggaggtgtgtgtgtccataaaaacgttgcgccagggatcctggtgaggaagctrttctgtatcctcattgctggtgttcacgtgaatctacatatgtgataacatttgatggaaccaaatacacmcacaaacacacacatacacatatgagtgcatataagaccagagaaacttattttggtggattccgtaaatgtcaaatctttggttatgatattgaagtgtagtttggcaagatgttactattggggaaaatagtaacattgtactattgtcctgtgaattattgattcacaggaaattgtaaaaaaaaatgctttgtcctatacatttttttagaatttcctgtcaatccataattatttcaagataaaaaaagttttgtaaaggaagaattttkgagactctttcagattttttattttgagatttaatcwattatatgagaaaaataagctttaactgaccactctttccttcctatccaaagcttagtcaatgagaaaatgttgcaagagaaggagaatggggggtacctgagactccaggagagtacataccctttttaaaaaagcaatacaagccagcagaaaaaggaargatgggactctggagcgattatgtgaatctgtggttctcaaagttcagcatgcatcagattcccagagggcttgtttaaacaaaaatttctgccctgcaaccacagagtttctgattcactaggtctgggggtggtgggtgtggttcaagaatctgcatttctagaaagttcccatgtgatgttgactccagtgctgatgctgctggtcaraccacactctggaaactactgccatagaacatctgagagtcacaatttgaaactgtctcaagaaatttctaagtaaaatgcaatgcaataaattacttaagaattctctatatttacaactctttatttgwatagtttccttccccctcagtatgttggctggtaagaatgttctttttgattattcatctgtgtgggctcaagagtgtgtcactgagttaatttacaaagcctcggattgcatatccatcacatttgtagaaagtattatcccagaaaaatccatcaacacaacacataagctccaaaatgtactgcacaattggcgtgcaatagagtagtcaaagaaccaatgaaatgyaaaaagttatctatatggagatctcaaaatgaattaacaaattaaatcctttgacattgtatgagatcccattagggttcattgttacagttttctttaatgtttctaaaatagaaatgttgtcctgggcagagcagtgtaatgtacttgctttggcatcaaatgccacattttttttttttttgagacggcgtcttgctctgtcacctaggctggagtgagtgtgcagtggtgcaatcgtagctcactgtagcctcgaactcctgggcttaagcaatcctcccacctcagcmtcctgagtagctgggactacaggtcccagstgcccagctatttttaaaattttttgtagagacaagtcttgctatgttgcccwggctgatcttaaactcctagcctcaagaaatccttcagacttgtcctcctagagtgttgggattacaggtgtgagcctccacaccaggcattgtttctattttaactttgctacttacgagaagtcttaatttgaccaacaactaatgtaagctctagtttccccatatgtaaaaagaagataatgcctaaattgcagggtttattgggagaattaataagaacacgcctaggccaggcacaatggctcatgcctgtaatcccagcactttgggaggccaaggcagctggatcatgaggtcaggagttcgagaccaccctgaccaacgtggtgaaaccctgtctctactaaaaatacaaaaattaggggagtgtggtggtgggcgcctataatcccasctactcaggaggcttaggcaggagaatcacttgaacccgggaggcggaggttgcagtgagccgagatcgtgcaattgcactccagacttggcaacagagcaagactccatctcaaaaagaaaaaagaaaaagaaaaataagaacacgtctaaaataattagtgcagtgtctgacacttaagttctcaaatagtggcggtgaagatgtgaaggagggtagagatgactgtgattattaatcatcttatttgttgatcatattaaaatgacaaaaaccacaattattttgcaccaacctaatatttcagcagatgtcctctgaatcagaagtaaatagccatgataatcttaccattagttattttattgagcaattacaagtcccaggctcttacgtttttatattaattttttacaaccagtttatgcgatgcatactgtcctcatttatcatataaggaaactaaaacttaaagagtttaatatattgctcaaggttatccagtgtattggtttgctagggctctgtaacaaagtaccacaaaccaggtggctcaaacaacagaaatgcattgtttcacagttctggcgtcaaaaagtccaaaatcacagtgttggcagctttggttccttctgagggctgcaagggaaagattgttctgggtmcttctccttggcttgtagatgtctgtcttctccctgtgtctctccatgtcattttttcctctatgcatgtctgtctctgtgtccaaatttttccattttaaaaggacattagtcattgctgggcacaatggctcacacctgcaatcccagcactttgggaggctgagagaggcagatcacttgaggccaggagttcgagaygagcctggccaacatggtgaaacgtgtctctgcaaaataatacaaaaattagctaggtatggtggtgcatgcctatagttccagctatttctactcaggaggctgaggcatgagaattgcttgaacccaggaggcagacgttgcagtgagctgagatcatgccactgcactccaacctgggtgacagagtaagactctgtctcaaaagaaaaaaaaaaaaaaagggcattagtcattggattasggcccaccctatggaactcattttaacttgatgagctctgtaaagaccctatctctaaattatatcacattctgaggtgctgggaggtaacactccaacttatctttattgaggggggcagaattcaaatccatagcacatagtagtaagatgtcatgctgaggtatgaaccagacttcatacgcaatgctgtggactaaacttttgtatgcctgtgaaattcatatcttgaaggcctaatctctactgtgacggtgtttgagatggggcgtctgtgaggctttaataggtttagatgaggtcaggagagtgaagtgcttgtgttggaattagcacccttataagaagaaaaaaaggccaaagcctcctctctctctgccacctgaaaatgcaacagggaatggccatccacatgccaagaaatgggcccttatcatacaccaagtcttcctgcacattgatcctcgatttctcaggttttggaactgcaggaaatcgacgttcattgtttaagccacrcagtctatggtattttgttatagctgcctgagctgactaagacaggcaatatatgacatggccgtttgctccaggacttttaggaaatgtggatcccattggtagtgctcagcaatcaaatttatttgatcctcatgttcagcagacatgttgtttttttcttcatgtattgccaactcttttatatgatacataaaacatattgaaaaacgtagacttgctatctttatattccacatgttggcagattctttccaagaaaagtgattttcagatcattccttaggagcgttgaggctgagaagtggtctttgcatatttatatttagaaattatcgagtccaaaatctaaatattgagtcttggtagaagagaaaaccagtcacaatttatgtaaaatagttgttcctaggtaatgaaccaaagcagggactatatttgagaagtagaatggtattgtcaaagtcagtgtacaatcaggaaattaaagagattattttatccaaactattgcagttaatgaggaatgtctcaaaagaaagggaagcagggttttatagatataggggaacaaaaagtttaagggatttcttaaccaccacttttttctagaagcatagggattaggtcacattcaacattttcagtccccacttctacttcagatcaataaacattataggatgctgaacaacatagaggtgatcatcagaaacctgagtaagactgagcagggtctaagaaatagtctctcaagagttcttgttggcattattgtcgtaacatcacctaaaccagctgttgagaagtagtggcaaaggccagttgtttcaaagtcatagagatcaggctccttaaaagagaagtatttaaaatgaaaaacattaatatcaaagattatgttaaagaccagagtttaaccctgagcataccagtccagcaaattccaaaaggtgggtggggaaaatctttcagttacacagtaccrttcgttgagtttcttgaagctaggatgtcaatgttcttgatgatgttcagtctcggttagctttcctctaagagaatgaaggacctgagcttttcaccagaatttgttaggggctcagacagtggtttgtgcagggaaaagtctggcctgcgtgtaatctgctgcagtggtgagttcttcaaagtttgaatcaagtagttggacttcagctggcagaatttcttcaactcctggagaaaagagctagctgctagacaacctagagttccaacaggaatctgggcaatcagatgttatttttcagtgacatcaagttagggaaagagagaaaaattggaaacattaatttgtagggttgtagccagatattgaagcaaactggaaggcttcacagtttggtacaaattaacaatttgggcaagataacaggatccagttcaatttttaggaaggtgtccaaactgctttttccacaraggaggggaagtcatttaaatcattccagacaagtcagaatttgcatatgtatcagttacctgcaatttatgaaactgtataatatggctaagagataattatgtctacaatctgataaacaggaaggagctgcttgctatagttttccactgaaacaaaacatttctctctatagtcacccctcttttgatcaaaaataatctcaaagaaagattattcttgatcacaaaataaagctagtaccatcagatttggcctgattatttacatkgttgtcttaaagatgataattcactacatagggtttcttatatttgctttgctgaaagttttcataaggaatctcaaattgaatttttaaaaaccacttgaggctaggaagctatatcaagaactcaccaacagatttacctacagtatctataaatttcrgtaaatgcctctcttttagaggtcccaaaaatatctcaagttttctgagcctgcgaggaagtatcctttacctgtaaatttgggcacctcattagccagraatcaggctgrttttcccaagagggctttaaatgagcatacctaatgtttccaatatttcatgcaaacaaggaagagttttattgaacctatgcaaataactataattttgaaatataatgagaatactcagtaagaatttctgatttctctaacagtcaggcaggaagaaaaagataccaatgacaaatgtttcatttatatttgcaaagcatagacttctgaattrttatgagtttcagttagtttaagagaaaatagaaakaagtttcctatgtccaaaaaatcaaccattaaaatatcagcaatattccaaacaaaagctacagtcattcctcatcagttccttcagtcctgtgtaattcttgctctgcttcctcttggcttaacagtttcatgcatacatctgcctctccaaacagggctctggaaatcctgactcagtctgctggtatggtctcaaggttgtgtaagtgacggcatcagaagcttctgccccaaatgaaaagtacctggcatagagctttgccatggggctctgagataatcctttgttragacaaagcactacagctagatttgtaagagctttcagggaagcaccacaaagcaaaattctatttgtaaatgacaaaagccttaaaaattactttgaaaaatcattttcaaacgtgaaagatgtaaggagtgtttatcacaagaatctccatttgaaaaatactggcttataggcacagaaaaacaaagatagtatgttctcacttacatgaggaatcttaaaataatcacactcgaagcagatagaatggcggttacaggggatgggggtggagggaatggggaggtgatggtcaaaggctataaaatctttattaggaggaatctgtttttgttttttgagttctagtgtacagtgtggtaagtgtagttaataataaagtgttgtacatttcaaaattgggaagagtaaatttcaaatgttctcacacaacaaaatgactagtatttgaagtgatgtcgttaactggctcaatttaattattccacatggtaggcataaatcatattatcactttgtaccccatatacttacaatatcataaattgtcaatttacagtttttttttaaaaaaaaggaaagcactggcttagaakaagctaatttgaaattaacgaataaaagttgttaccaagttaacattttaaaaataactgaaacttatgactcatgtggtgctctctaataacagggcaaagtgacatcgggactcaaagaaaaacacgttatggacataaaagcctttgatgactctctaggaattttccatacagcatacaatttctgaaatatttatactgataacattctgcccatacagatttgtcctagggaaggttaagcatctcttctgagtwggcaatgactcccgtgcaatttgtaaatagtaacatatcaaataaacctaattcttttcagcaactttcttttcataaggtgaaataacaaatcctttgtgattttcaaaggccctctgggagatatcaaagacagtttcagatgcaatagatatcacttaggaatcagttttgggagggaaaatatcaaaagttgtcaggagattgggacactttactaggatacggtcgtgagttactgataaacaatactttgctaccttaactaaggtgacagcaaaaagagtgaaaaagtaagcacaggcagtaacatgattgtaaagaatcttagctttttcaaaagggagaagactttattaaataagcaaggacgtgataaactcaatacacaatataggaagttattttaagacatgkaatctttgccttctaggcagattactcagaaggtaaagaaaaaatattattaagagtagactaagaagtyaagaaaatgttatgtttttaaacagaggcaaaattaaattctactttgcatcattatggcatttgatattaaagatctttttgaaatcttataaatgaattcatcaagccttagctagcactgaccacagcaaagtttgtttcccacaagcgttttacaactttctacgtctattcagcttttgtcctacacattaacaactagctatatgacttcagaataaaatgactctatttttttcttaacaaaaacatgttctgcaaaccttgcatacaaaattgtatctctctgctattattatgccttgtagaatctcattcatgtatattgattataatttttaaatagaaatagtaacatctgttgcacaaagaaaaaagggaaatggataattgtgatctttctgtcatacataagctttttgtaacacactagtggaactcatgaatacacatctcacaacttttaatagccatgcatattatttacagcacgacttatgcaaagtggcaaaaatgaacacatttattaacaaaactgaatgtacatgcttctctatagcatatagaaacaaaaggcaaaaaagtatataaacttaaaattatgcttggttaccaatatttcacttttctctcttgcatagaaattacataaatatccaattaatattcattaattaattcaatttagcttcaatccaaggttttaaattaccaaatatcttggaatttgtcttcaggctgacatgctccaaaatattagtaccattgaaagtttgttagaataatgactcaatttgcttaaacacaaatttttattttctattgtattaaacattaagtagaagtaatgctaggttatttggttggtaaatctaagtttaggaagaacattcacaagtagaatagaagcatacttgtgttatatttaacactaaaaactcagagaaaacagctatttttactaaatcaacctcattaattgattatcaaaataataattattgttaaatattgtttgccaaacatttacctagattttgtgaacttgaattattgtctctgagttatgttcctacaagakacagctttttcccctacagtaaaagtgtttaaggctcaatttcctcaacttctgggaatttgggaaatatttggtttatataaatggttatttatttctaagccaattagaatagagctcctttaagagattctataacctaatttagcgacaccatcctgaggtagggaaatattttatttttatttttttcagagatgggctagattagaactcctgccttcagcctcctgagtagctaaggttgcaacttccatagtagctgaaattgtrggtgcatgccaccrtatctggccaacagggaaatattacatactctaacaatgagtggtgacwtcctttctgaattacagacatgtagacattaaagcagagatagcaagaatttagtttccattctaacatttaagccatgggtcaagagtggacacagaatcacaaaacttactgtttcatatcaaagagctgttctgttctcatgattcttaagtgatttgagctcaaaacagacaaacagaaaagcgtagcaaaccaaattctctgttgtctttcacccataagatacaagatctctaaaagtcattaatcccctctcagagatcaccaagtggtcagaccacaaaaccaaagccagtgccagaaatcaagtgagtactaaaaccttgccttgctaccaatagacaagggtccatatcacaggaccaggagttagacttattcatagttccttggaccaggaatggagcacaaagggcccaaataagccttattacctgtgttgagtaaacaaagatcccagtgcaggagatccatatcatggcaccaaactatcaaatacaggatgcactaggtcattaaagagaagattttattcaaagcattgcaaaatggagaacattgatttatggtgaatatcttgaagaaaaggaagggggtctggggttctatagrggcaagaaaaaacgggagtcatccagaagtcttataaaagtcatgaagaagggtggagatgggtcttatctcagaatatgggaaggcagtttgggcctttgcattagttgtttgccagacactaaagggtagagaggtttcttaatcattactcttttccrgaagcacagggctcaggtaagattgaatatttttcatgcctttcatcctctctgtctgatctctttcaaacygtcttttttgttgaggctatatgaaatgtttactgttttaccttccaatcaactccataaaaacggttgatataaagcatctagccaagttccactacattttagtcattcattatggaacatcatcccaaggaaggctttattctctctgtctaagcaagcaatgaagggagatcttttggaaatggcctagtatttgatgagaagcaagaacaaggtctacattagtggatcacagactttttgccactgagatccaccatcgaaaatgcattcattattacctctgcatgtgtttatttaactgcaacaatagtttaatgattttcataacacaaaacttcacagtgtatgatgacactgataccttctagtctattcccagctgttctatttcatttttttatagcttatagtgactcattaaaatggatttccacgaatgcaatgcaacacacagtttgaagtccactggaaaatcttttaaaactgttattataaaatgaatttagtaaccttttcaaaattttactagtrtagtttctgtggtttttaagaatacaaatattttgccttctggtcttttttttcacacaagtatatggcagattcctataaatattttaatagatcagcagtttccaatgccatgtttcggtgatgatattttaccagagatagtctgtaatgaaaaattgagacaaatgatgacaatgtaatttgcagacatgtatacttatttataataaatttgtagacatgtatatttagttagttattcaacaaatattcagtgccttttatatcttaagaatggttcatgwtaattggaggcaaacaagaaaggcaaagttactgcttagttgaaatttacattctagtataaaaattgccatatttattattattattattattatacttaaagttctgggatacatgtgcagaatgtgcaggtttgttacataggcatacgcttgccatggtggtttgttgcacccatcaacccatcatctacattaggtatttctcctaatgctatccctccccgctccccccaccccacaacaggccctggtgtgtgatgttcccctccctgtgtccatgtgttctcactgttcaactcccactwatgagtaagaatatgcagtgtttgtttttctgttcctgtgttagtttgctgagaataatagctttcagcttcatccatgtccctgcaaaggacacaaactcaaccttttttatggttgcrtagtattttgtggtgtatatgtggcacattttctttatccattctatcattgatgggcatttgggttggatccaagtctttgctattgtgaatagtgctacaataaacatatgtgtgcatgtgtctttataatagagtgacttataatcctttgggtgtatacccagtaatgggattgctgggtcaaatggtatttctggttctagattcttgaggaatcgccgcactgtcttccacaatggttgaactaatttacactcccaacagtgtaaaagtgttcctatttctccacatcttctctagcatcttgtttcctgatgttttaatgatcgccattcaaaccggcgtgagatggtatctcattgtggttttgagttgcatttctctaatgaccagtgatgatgagttgcgtttctctaatgaccagtgatgatgattttctcatatgtttgttagccgcataatggtcatttctctaatgttagctgcataatgtcatttctctaatgaccagtgatgatgagttgcatttctctaatgaccagtgatgacgattttttcatatgtttgttagccacataaatgtcttcttttgtgaagtatctgctcatgtcctttgcccattttttgatgggattgtttttttcttgtaaatttgtttaggttccttgtagatcctggatattagccctttgtcagatggatagattgcaaaatttttctctcattctgtaggttgcctgttcactctgataatagtttcttttgctgtgcaaaagctctttagtttaattagatcctgttcatcaattttggattttgttgccattgcttttggtgttttaatcatgaagtttttgcccatgcctatgtcctgaatgatactgcgtcagttttcttccagagttttatggttttaggtcttatgtgtaagtctttaatccatcttgagttaatttttgtataaggtgtaaggaagaggtccagtttcagttttttgcatatggctagccagttttcccaacaccatttattaaatagggaatcttttccccattgyttgtttttgtcaggtttgtaaaaaatcagatagttgtagatgtgtggcattatttctgaggcctctgttctgttccattggtctatatatctgttttggtaccagtaccatgctgtttgggttactgtagccttgtagtatagtttgaagtcaggtagcttgttgcctccagctttgttctttttgcctaggattgtcttggctatacaggctctcttttggttccatatgaamtttaaagtagttttatctaattctgtgaagaaagtcaatrgtagcttgatggggatagcattgaatctataaattactttgggcagtatggccattttcatgatattgattcttcctatccatgagcatggaatgtttttccatttgtttgtatcctctcttatttccttgagcagtggtttgtagttctccttgaagacgtccttcacatcccttgtaagttgtattcctagggattttattctctttgtagccattgtgaatgggagttcactcatgatttggctctctgtttttctattattgatgtataggaatgcttgtggtttttaaacattgwttttgtattctgaaactttgctgaaattgcttatcaktttaaggagattttgggctgagaagatggggttttctaaatgtacaatcatgtcatctacaaacagagacaatttgacttcctcttttccaatttgaatatactttatttctttctcttgcctgattgccctggccagaacttccaatacaatgttgaataggagtggtgacagagggcatccttgtcttgtgccagttttcaaatgcttcctgtttttgcctattcagtatgatattgcctggggggttgccataaatgactcttattatttttggatacattccatcaataggtagtttattgagagcttttagcatgaartagcattgaattttatggaaggccttttctgcatctattgagacaatcatgttgtttttgtcattggttctgcttatgtgatggattacgtttattggtttgtgtatgttgaaccagccttgcatcccagggatgaggctgacttgatcgtggtggataagctttttgatgtgctgctggattcagtttgccagtattttattcaggatttttgcatcaatgttcatcagggttattagcctggcattttctttttttgttttgcctctgccaggttttgctatcaggatgatgctggcatcataaaatgagttagggagaagtacctctttttctgtcatttggaatggtttcagaaggaatggtaccagctcctctttgtacctctggtagaaatcggctgtgaatctgtctggtcttgggcttttcgattggtaggctattaattactgcctcartttcagaacttgttattggtctattcagggatttsacttcttcctggtttagtcttgggagggtgtatgtgtctaggagtttatcaatttcttctagattttctagtttatttgcgtagaggtgtttatagtattctctgatggtagtttgtatttctgtgggatcagtggtgatatccccttcatcatttttttattgtgtctatttgattcttctctcttttcttctttattagtctggctagtggtctatctattttttaatcttttcaaaaaaccagctcttggattcattgattttttaaagggtttttcatgtctctatctccttccgttctgctctgttcttagttatttcttgccttctgctagcttttgaatttgtttgctcttgcttctctagttcttttaactgtgatgttagggtgtctttcccactttctcctgtgggcatttagtgctataaatttccgtctacacactgctttagctgtgtcccagatattctggtacgctgtgtctttgttctcattggtttcaaagaacttatttatttctgccttcatttcattatttacccagtagtcattcaggagcaggttgttcaggttccatgtagttgtgtggctttgagtgagtttcttcatcctgagttctaatttgattgcactgtggtcaaagagactgttatgatttccattcctttgtgtttgctgaggagtgyttcacttccaattatgtggtcagttttagaataagtgagatgtggtgctgagaagaatgtawattctgttgatttggggtgtagagttctgtagatgtccattaagtctgcttagtccagagctgagttcaatggaatatccttgttaattttctgtcttgttgatctgyctaatgttgacagtcaggtattaaagtccccactattattgtgtgggagtctaagtctctttgtaggtctctaagaacttgctttatgaatctgggtgctcctcatattgggaatctggttgctccttgtatttggatgygtatatatttaggatagttaactcttcttgttgcattgatctctttaccattacataatgcccttctttgtctttatctttattgatttgaagtctgttttatcagagactaggattgcaacctctgctttttcttgctttccatatcttggtaaatattcctccatccctttattttgagcctgtgtgtgtctttgcacgtgagacgtgtctcctgaatacagcacaccaatgggtcttgactctttctccaatctgccagtctgtgtctttaattggggcatttagcccatttacatttaaggttaatattgttatatgtgaatttgatcctgtcattatgatgctagctggttattttgcctgttagttgatgcagtttcttcatagtgtcaatggtccttacaawttggtatgtttttgtggtggctgttaccaktttttcctttccatatttagtgcttccttcaggagctcttgtaaggcagacctggtggtggcaaaacctctcagcatttgtttgtctgtaaaggattctatttctccttcacttatgaagcttagtttggctggatatgtaattctgggttgaaaattcttttctttaagagtgttgaatattggcccccaatctcttctggcttgtagggtttctgcagagaattcctctgttagtcttggactttcttgaagaaatgggcttctctttgtgggcaacttgacctttctctctggctgcccttaacattttttcctttatttcaaccttggtgaatctgacgattgtgtgtcttggggttgctcttcttgaggattatctttatggtgttctctgtatttcctgaatttgaatgttggcctctcttgccaggttggggaagttctcctggataatatcctgaagagtgttttccaacttggttccattctccccgtgactttcaggtacactaatcaaatgtaagtttggtcttttcacgtagtcccatatttcttaggggctttgtttgttccttttcattcttttttctctaatctcgtcttcatgctttatttcattaagttgatcttcagtctctgatagtctttcttctgcctgatctattcagctgtcgatacttgtgtatgcttcgcaaagttctcatgcagtgtttttcagctccatcaggtctttatgttcttctgtaaagtggttattctagtaagcaattcctctaaccttttttcaagtttcttaccttccttgcattgggaggagcttgttattacccaccttctgaagcctaattctgtcaattcatcaaactcattmtccatccagttttgttcccttgctggtgaggagtttgtgatcctttggagragaagaggtgttctggtttttggaattttcaggctttttgcactgatttatcctcatctgtgtggatttatctacctttggtctttgatactggtgacctttggatggggtttttgtgtggatgtcctttttgttgatattgatgctattcctttctgtttgttagttttccttctaacaggcctctctactgcaggtctgcaggagtttgctggaggtccactcgagaccctgtttgtgtctacggccataccaccctgaatgcgcccgatctcgtctgatctcagaagctaagcagggtcgggcctggttatacttggatgggagaccctgtttgcctgggtatcaccagcagaggctgcagaacagcaaagattgttgcctgttccttcctctgaaaactttgtcccagagggacacctgccagatgccagctggagctctcttgtgtgaggtgtctgtcaacccctgctgggaggtttctcccagtcgagagggatggggatcagggagccacttgaggaggcagtctgtcccttagcagaacttgagcactgtgctaggagttctgctgctctcttcagagccggcaggaaggaatgtttaagtctgctgaagctgcacccccagctgccccttcccccgggtgctctgttccagggagatgggagttttatctataaacccctgcctggagctgctgcctttctttcagagatgccctgcccagagaggaggaatctagagaggcaatctgactacagcatctttgctgagctgtggtaggctctgccaagtacgaacttcttggtgctttatttacactgtgaggggaaaactgcctactgaagcctcagtaatggtggacacccctcccctaaccaagctagagtgtcccaggtggacttcagactgctatgctggcagcgagaatttcaagccagtggatcttagcytgctgggctccatgtgggtgggatccgctgagctagatcacttggctccctgactccagccccctttccaggggagtgaacagttctgtctcactggcattccaggtgccactggtatgaaaaaaaactcctgcagctagcttggtgtctgcccatatggtaaccagttttgtgcttcaagccatatttcttttattggaaaatatagaacttttccttctcacattcaacttcttgagaggatctctttgataatgtgttcatgtacacagttcacatcaaatatatataacatgtggatcaaagtgttaagatattcttctttacatatagtgttagtagctgacgatttttttttcttcaaaaataaatttggaaacttgtcagtccataatttttttaagtattattttactatctcatgaaatctgaaaggctagaatacactagataactcttgatttccactcctaccctgccatgaagtgataattcacatctggctataacttcataaaaggggcaggrcgacccacttcctaaaagaccactattgacttgaagacctgtgtctcttgtctcacttctaaaagtgatttaaaactcaataactcactctgaaatccactgtataagaaatagtaatgtttagggtcatttaaaagaaagattagtttaataaattttggcaccctgtttaacatataaaaccatgaccatgtgttaagtataaccatattttgtgcagaatgtgattcaaaagactgatttaatagctatagtccaagaagtgttgaaaactcttgcccagtttatggtttccaatataggacacatatcaacagaataagaaactcaagaattaaactgatgactgtgtcgacctctggaggaactcttttttaagacacaaagccaaattttcaccttcatttatgcacactcatctyctgaaggcttmcttatgcatttacgtgtgaaggaaggagaggatttgactcagtctctttgtctgtcatctttcttcctctctcattctgaaatagcttttcacagttgaggaaaaaataaagatttgaccttcccacagtgaatgataacaatgataacagctgatctttatatagtgtttattatatgacagagatcatttcatgcactttgcttctaagaactcatttattccttacaacactgtaagtactgttatccccattgcacagacaagaaaaatgagcttctgtattagtccattttcacactgctataaagaacttcctaagactgggtaatgtatagaggaaagaggtttaattgactcacagttctgcatggctagggaggcctcaggaaacgtacagttatgtggaagaggaagcaggcatatcttacatggtggcaggtgagagagagagagagtgtgtgaaggaggaactgtcaaacacttataaaaccatcagatctcgtgagaactcactcactatcacaaggttttttgcacagacaaaaccacccccatgatccaatcacctcccactaggtccctctctccacacatggggattatggggattacaattcgagatgagatttggatgtgggcacagccaaaacatatcaggtacaaacaaatagtggagttaaaaatcaaacatggaccatctgcctctgtagtccaggcccttaaccactacattatataacctcttgagagaggaaaacttagattgggcaatattagcatccaattgccagtgcaaaaggaaatggaagtcagcacaccagcttattacttacccgagatcaataagagacctgcaaatacttgactccgggttatagacttggtaaatccaaatgatttctctcatgaatccgaatccctgccagtaatgcagatattctaacttgagacttaccttccagactgaaaatgccaaatgagaaaaaccaagtaagtttgagtttctgcagttacaaagtgctatggtttgaatgtccctatcaaaactcaggttgaaataaaattgccattgtaatggtattaggagatggggcctttaacaggcgattaggccatgagggctctgccttcataaatacattaatgtcattattgcaggagtgggttagttatcacaggagtgggttagttattgtgggagagggttcctgataaaagcataaatttcacccccgtccactccatcttcagtgctcacttcatccttccaccttctgccatgggatcaccatccccagatgccagcatgatgttcttggacttcccagccccagaaccatgagccaaataacttctcttctttataaattgcccagttgatggtattctgttatagcagcagaaaacagacaagacataaaggaagacacataattaccctcccccaacagttcatgttacccctcaacattgttttagtcagtgcaagactaccaaagtataggtgtctgaacatcagggaaatgtaaatagagaaggtaaatgaattcaaccttccttttccctatactctcatttctgtcaaatataaaaacctgtgggttttacccttgttccagtttacataatcacattccaaattacttatgtggacttttatgagggctttttttctttacacctctctccttttctcatcagcctctgcaatcagctttatacaagagttatatttcattcatttcattttcttttctttctatttcacaagttctgggacttggctgtcaaccgaatcttgaacttggtaattaaattgttcataagctccaaacatgttgtaactcatgtcatattcatgtacacttctctgccccaacttgataaaatgagtgatactgggacaccattgtcatacacacctccaaacctgggtgtgtccacttcaaatgcctgaacttgctcaaatagaaatgggattactaaaacaactatatatcctcaccatgctggttttagtaggaaagatgcatcaaggataaagctctccagtgaaaagcatggggctgaaagaaggaagtctctctgaggcagaagtcctttggaaaaactgaagatgacgtcctagataattttgaagtcttatgtagcaacagaagtttatgtcattaatttagcaaatagtcatagacaaaacatgcaactttagagcaagtgccaggctgtgccaataattccacccttcacctccacatggggtcagtccatagaacaaaataccaaaggccttagtgctcaggtcttttgctcctgacattctcccttcatcctttccctatccccacttatccttttttaatgcactatagatgagtatgtcttaatttcttaagttaatttgcattggcattaagcacctactttatttatttcctttctcaacaactctcagactttgattcttcatgtccttccagggccctgccccatgccttctgctaaatgctaaagtcatgcaacagtttagtactgcgtagagtaggatggctagcaaaaggaaatctctcaaaggagcttcatgctctctgtgactcagggtagcagtatatggccttcggcacccactgtgggctgggctatggcagactttgcttgccctcattgctctctttgctttccttgatcttgcccctgtctgtcttcattttctcccttctcacttttttccctattgttacttacagtttaagttatggaagaaaaacacttaatgcttattggccactggaggatacacctcataacttggaaaatgaaaataaacactttaatagttttgtacttgatatgatgactcttttaaacaaaacactttttatctaggcatgaccttagatttatgggaaaagaaagttgcaaagatagtacagagagttcctgtatacctgtcttctagcttatgctaatgtggaaaacttacataagtgtggcacagttgtccaaaaaataaattcacattggtataattctattcactcaaattcagactttactcatatttcatcagttttttcattattatcctttttcttttcccagatctaattcagaataacacgtgtgttactacatgatgatttaaaatgtttacaaaaacaagacctctacctatgctcctattagtgtgtgtgtgtgtgtgtgtgtgtgtgtgtgctggtgtgtgtatatctttatttaataataaaactagaagggcaatgaattcgaaacggaggcttttcttactagcctttttaagatagacattgctgacacatggacagggattgaattagtacaaatattaaatatcattaagccttcttttttgagttctgtctgcacatcaacttcacctgaagaatgtttgtaaaatacacatgcttgttccccacccaaaatctattgaatcagaatctctagggagtgaggaccaacagttgygcttttaacacctccactccccccttgtattggacggtaaaggccagaaaagattaccttaggcattctcatttcagaagctaaaacagacattcaattttctataccctaatttgggacttatatctgagtgttaatatatgcatgtaatactttgtgatgaatgttaaatgtgttttaatagtgttcccttgcagaatattctttcctttgccggtattattaagactatcttgcattgggattcatgcccccaggcttacagttctctgagctatacttgcatacactgtcctcagtgaacctgggctttggatccagatcgccttgaattcaaaccctagatctgccacttaaagactcaagaaacttacataacctttttgtaattgttctctatctataataaatgaaaagtattactaattattacttacatgcaagattgttgtgagcgtaaaccacatgatgtgtggaaggtttggggcacagcattctttaccaattcagggtaaccctgaaaacttaggaaaaagagaggattcatataaatcacaaattttgcaaatgcattttaaatcctctctttgttccagctccttgtacagacaggactgcttgctactaagaatttccaacacaacctccaattaaatagttctttgatgtatagtgggtacagaagaagtccaacttatttgcatttgcagaatcaggagacccccccaaaaaatgctggaggtgtgaaagcaagaatcagaatttgtcaggattctccgtaaagtactagcggttttgtagatgctttgcagctgtggaactataaacactcaaccgcagacacctcattttatatctcttctatgtggtatatttcccttgtgaaaatgtgtatttttaaaattcactctgcaaaatgacagtcaatgttatcaaatatacatttatatgcccttgattgtaaaacccactacaaagtttattaccttaagtttaatagaaaacaattttgaaaaatgggaaaaaaatatatctgtcacagggaagtggttagaggttctaacagaggagatttcttgttagaataatttgttgtattttggttatacattttttgtttttctttcgaatgttgaaaaagttaagaatatattaatacatggacaggttagaaaatatgtaaataataggttggtcaaatcctgcagatgacaaatcatgagagtttgccaagctaaggggccctggccactcataccatccctttatctaactcttcctcctcatccagtcccataataaaaaatattaagcttgcacgtggtaccttctcttctaggctacttgttaatgggtcctcttaattggctatgtataaaataagattcccatgggcagaaatctttatctgatctgttcatggacatatccaagtgtcaactagattttggcacacagtagatgtttggtaaatatgtattgaatgaatgacagacactgtgctccacattgtaaacacatcatatcatttaatcattataacatccctatgctatcccctatgtgctattattagctccatggtacagacaataatcaggatagatcaggaaactaaccaaggttacacggacagtacctagatggcaggaggccccaaagcatgtgtactaagcattatggcacactgccttcctgtctggcattcttgggacatgcatgtgtgagcgataaggtaagtccaggaaagcgtggggcactgggagaatgtagaagtagggatgatggaatttcatttccacagtgagagccccccatcctgctcccattgtcagacccgcactttttgttatctcttttccttctgtcttgctacgtttgctttgtcttcttcctcgatagtttcccaaagactttaaacgactaactatcaaagaagagaatatatgtgaagtcactagttacttttctgctcaattagctatatatagattaactttttaaaaaaatattttccccatacacccactcacataactgtgaagcttaggaaaaatttcaagattatcgtgggtgggccccatataaatccccacactgtcaattctcccagcagctgtttcttaattcgtcatcagtgtagaaatctaaatcagcactcagtgaaatctaaaagtccaaaagatttatttcaaatttcaaacctcctccctaatgttctgaggctgtgtcaacacaggtagagagacggggagagctgagggtatttaagaatcacataatgtgagaaactgaggagaccctagggatcttttagccctaccccctcatttacacataaggaaatgggatctgaggccaacagcaaacttgcctgcctgctatctgggaagttctattaataacacactgtcatgggggaaaaaattcatacaggtaataaaggtttgttattttcaaagattaacattctttattaattaccacttttttgaaactgacacagccacaaaaaactcctgtataagaagaatttgtctaataaattgtatgattgtttattgggtatctgtttattttcttaatttttaattgtctgtcaatccttcttgatttaaagtagtcacataaatatataaatgtaaagagttaatataactaattgaattcatttgagggaaaaaaattaaattttctttttaaaaaaagaaagaaaacattaaagacagaggtaacattagcacaaaaaaatgtgtataatcaaagtctagagggaggcctaaatgtaaatcaagctttctagtaagcaaaaacaaaagagaaaacctggttaactccaaggttcagaattgctgtgatatgcagacaaaccagctgtgaagacactgcacaacagtctatgataaaaagacgggagggacatttcttgtttgtatagcaaaggtctacaatttgcaatgcactgtggtaaaacagaaaccataagctgaatgcttttgtcactgaacttatattttagttagaaaagacataagaaactaattgtggcatttaacttataatttagttagaaaagactaaaaaagctaactgtggcatgaatgagaaagaaattactgctctattagtggttccaatactgtgaggccacaggaaaaaaaaaaaggattctgaaagatacggtttggaaagacttcgtggaggaagtggcatatcaacagggacttgaaggctgcctagatatgcaaagaaaaagttcaacggaaatacaggatgaaagaattgggtggtcaaaggaacaaacccacttgctgatagattgtcaaaaagtatagtgtctgcactactatgtgacgatgacattttttttccctttgtcatctaaaattgctatcaggccgggtgcagtgactcacgcctgtaatccaagcactgtgggaggccaaggcaggaggattgcttgtgtccaggagtttaagacaacctggcaaatatggtgagacctctctacagaaaaaattttaaattatctaagcatagtggtgtacacctatagtcccagctactcaggaggctcagataggaagatctcttgatcccaggaggtggtggctgcagtgagccaagattgtaccactgcactccagcctgggcaacagagagagaccctatctaaaaaagaattaattaattaaaaaaataatattgctgtcagtaaagactgactagtctgtgtgatatttatcatagctatatttcataactccagtgacctttttaaataaaaagtaaggtccagttgaccctccctgtctgtaggttctgcatacattcaaccaaccatgggtcaaaaatattcagaaaaaaaaatttaaaaatacaataaaaactaatgtaggctgggtgggtgcaatagctcacacctataatccttgcaatttgggaggctgtggctagaggatcacttgagctcaggagttttaggtcagcctggcaacatggtgagaacctgtgtctactaaaagtttaaaaaattagctgggtttggtggcatgcatctgtagacccagctactggggaggctgagatgggaggatcacttgatcctaggaggtggaggctatagtgagccatgattgcaccgctgcactccaacctgggtgacagaatgagaccctgtctttaaaaaaataataaaaataaaaatcaatacaatataacaactatttagatagcatttatgttatattaggtattacaagtaatctagagatgatttaaaatataggaaagaatgtatgtagcttataggcaaatactacgccgttttacatcagggacttgagcatttgcagattttggtatccttggggggtcctggaaccaatactttgaggatactaagagatgattgtccattaaaaatgttttaccataaaggaaacattttatctcttctgtgtcagtctgtgaccttttgggtggaatctgaacaatgtgtaaatgatagtttcccaacagtgtgcgctgatgtgtaggagtagaaaatgatcctttggttttcatataaaaactttcttatgaaacatgaagctaacaaccaagaagattaatcccaccagtgagacacaaggaatgcttaattttggaagtgaagctacttcctcatccctgaggcagcacatacactttttcaataatcctttatttaacaagatccaagaatattaatatctaacagcttagcctaaatttcttgaaaggaccaagcccattgtgttgtctcctgacttgattttcccaaactgtcatggattttctatctaaggaagatgagttccttagttctgggaaaacaccattgaggaaggatgcttcagaagaggaagggatgtcagccagggcagataaaattagcaagaaatattaagattaagtgctatctaagaggtacaaaaaataatagtgtttcacctcaatagaatcttattgttaaaaatacagtgtatctacagttytgaagattatcaaaacacaatattctagccccaaaacaggaaaagaataatgattcttaagaaaaaattctttctgggctgggtagggtggctcatgcctgtcatcccagcactttggaaggctgaggtgggtggatcatgaggtcaggagatcgaaatcatcctggctaacccagtaaaaccacgtctctactaaaaatacaaaaaaaaaaaaaaaaaaaattagccagacgtggtggcacatgcctgtaatcccagctactcaggaggctgaggcaggagaatcacttgaacctgggaggcggaggtggcagtgagccaagattgcgccactgcactccagcctgggtgacagagccagactccatctcaaaaaaagaaagaaagaaaaaaagaaagagagagagaaagagagagaaaggaaggaaggaaggagggaaggaaggaaggaaggagaaagaaggaaggaaggagaaagaaggaaggagaaagaaggaaggaaggagaaagaaggaaggaaggaaggaaggaaaaatattctttccatccattacacactgtaatgtaaaatgatgtgtcccagacaatggtctgtaaaccacattttgtaattccattgtaaaagataatgtagtgcgagcaaggccaaaaatccactattctttggaaaagtgtgccatttaattccactgaagataaggcagttggcacaagtcaacttttccccctggcttagatgtagttgtgcctttcaaaatgagctctctcatttgccaaatacaaagaagagaatagtgttttctcagaggaccacaggatatcaaacataattaaaaataaaagtaagattccctttgaatctagaagaaaactcacccaaatttcttgtaccaaatgaaggtatactgcagattttatcacagtcattaccatgagcagtcaataattccctgaatccctgttggacagaattacatcaggtacatgtgttgtgatgttttctgttttgagttctgtttgttttttatttattggtaattcagataatctcagtttcaggaatttgttttcttctctcctaaaatggagctgatgttcatctcttccttatgttatacctrtatttatgcaccaatttcatagaaaaccatcgtgcattttcccatggaattttgggtgacagtttaagatcagcgtttactataatgggcagacttaaaatggtccccgtgatccctgactcctgaagttcactcccttgtatgcttccccctctttgaatgtcagcggacctttaacctagagaatacagcagagttggccagatatatgtgattccatggttatcttatgtaagattggagtgcatgtcttgctagagtcttttacttccttattgactttgaggcaccaaggggccatattggggaaccccacatggcagcctccaactgagccaccaaagaagtgaattctgccaacaatctgaaggagcctgaaagcacagccttccctggttgagcctcaaatgagactgcagccctagccagtactttgattacagctttatgagatcctaagtaaagaaacaagcataactgagtcaggattcctaagccacataacccgtgagataataaatgtgtgttttaagtggctgtatttgttatacagaaataaaaaatgaacatacttactaaaaaagtttttagctgttgtgagtcctggtaattggatttgttttccagtgatatccatggacactgtgtcaatagtgatgattgatgctgatttgttttactcttatttattcaggatctgggtattaaaaataaattcaaactttcaacaggctgatcacctctgcccctctccctattagcatgtgcatgtgtgtgtgtgtccatgtgtccatacatgagtgaatggatgtgtatttaagcttaatcatgacacagggggttgtttatacagggtttttagaaaacaaaaacattgtctctatgaggcagttccttagaagccaactctcaacagtgtctcagtgtttccctcctgtaatttttccacacattatgcactggattttagtttgtgatactcaggattagtcatgaaaccaagtctttttgtgttctatggtttgaccagccctgtgcaagtctccagggaagcacgaaggacgggtaaatcagagtcccatcccttgaagcatggtggtattagaacatcacttaaagaacagggatacattacccatttagtgaaataatctagaagtcctggaaactaacttagctcacaagatgatattcattagccaatttacttcagaaactttaagaaaatcactttacctcctctgtacattcctccttccctccttccctctcttttcctctctccctccctccttccctcccttctttccttccttccccatattgttattaaatatgctcattattagaatagtatcaaagacactgaggcatttttagatatcttgtgaaatactccttatttttgtctcttcctttagatatcttaattatcaaaataatctaataagactctatttggaaataaagtgaaggagggtaaagttgtgtttttaaataggctgatcagtgctagaaataataggatagttttaaattctagcaattatagatcaaggctccatatactatttctaaaaagtctgtgaacccctgggaattgtgaatgtttcccattacatcctgccaacgattcttattaacctattggtgacgtctttcccagaggtgaagctttgatctgcttgtcatctcacattctgtctcaccacagtctagagcttccaggtccatggggaacaaggatggggcagcagcttccctgtgccaggactgactgggaaattccagaattctatgaccaggtacctgggaagggagaagagctctctgagttacagttagtctgggagcttttgaagtgaaactgtcatagggaaagtgaaggaatttgctttgtgcaatcatcatgccatagtctgacaagacaatggaaaaagaaagaaggaattttctctcaagatgtcaaataattagctgagtcatgaatgcaagcaggtaggcagaaaacagatatttgtagagaacttatttctctttctcctaatgaagtttttgaacaacaacgataaaatggaccttttgcctaagaagcaatttaacaaccattgcttcagtaacacgagaaccaatgtgattagagtgcttgtgctctgtcccctcataaatggttagtattgaggccttataaagaaatataacatctgctttttatacataaatacctacacgtaaccatccacaaataacttacgaatacccataataaacacagaatccatcattatgttaaatgccactgtgattctgagcattttaatatgctgtgaaggcatcagagtaaaacagaaacaagttatatctaaataggaatgcccagtacatttaaagtaatgagacgttttgctaaattcatatgttagcaatatgtcatgtggagtcatgaaggatcagaaataaaaaacagtaattgtccaagccgtcaaggagggatcagaagcaggctttgatcccaggctctgagtagagttgctgtggaattgtagattacatagaatacaggtggcatcaccacagattcctgtttatgtatttaacttgtaacttctcattctgacatcacaggaatatttttccttaacaaagtgaaataaaaagtaaataagctctttaatattgggacataaccaaatcagagggcaacacaaatttacatgggtacttgtgaggcaaaagaaagaaaattcaaaattcacttctaaaaatggacattgtttaaagcacatttaataagtgttacagagtgatgtttcactgtcacctttaaataccccttactgtttctttgggattaccaatttcaacatgaaggtccgagtgaactttgctagaggtgatttgcacaggctcatatgcatctcttcctcatattcagtgacctcacattagcagctttaaattggccatgttgagaacattgacaccacagaaattggcaaaaactagaaatcaagtaacacatgctacaagtctttttttttcttttctcccttcttggaaaattgtaatccagttgttaaatatttatcattataaagtagatccttgttaaaaatattctaatcctcaccaatggttttattttctttctgcctctcttctgctgcccctaaattaaagtaggtctttttatttggggctaagactagttccatcaaaatataaaatagatgaaaagtgttttggggcctttttgccctcttttcctagaccttttctgtttctcctcttgtcaaaatctcacttttttcctttaccttttcagccctgcttcagccctaggtcttcctaaaccagagaattttccaaaaactgcgtgaatatatatgccacaggctgaaatagtcttcccaaaaattagtcattaaaaaagtagagaaagaagatataagttttacatgaaaccctatatagataggagttccttcgagtattttcaaacttgattaacaacagagtaaattatttaagaatgatttaagaaatcaaagtatgagaacttggggctgatccaaagatgtggggattcagagatgaggggcaggcatagaagaggagaagagactgagtatttgtcaccacgtaaattcctgggcgagttgggtaaattttttattataagaaaacactcctttttcttctatataaaatttttttcaagtgagttgctaagttcattgtgagtcatgcattcctttgttcaagtgtggacaaatggtccttattttgttggaattttacactggcagagatcaatggtacaacctggtgaaccccccacaccaaagacacacaggtgtacttaaaggctgatcttctacagtacgcatctatggactggctttggggtgtgttcccaaacactcagagccaccttgagctggggaactggttagtacaagtctctttatgtgtcccttactctacaatcatgcacctagggtcgtgcaaacatcctgaaaccaacccaagctctaggagtcagaaaaggccctgaatgcatcttcaatacaggatctgtgcacacagcatggcctgcttctagaaaaccaatggggctcagaggcagtccagacagaggccttattttaagggctgatagaataggctgtgtttccccaacagcctaccttggtgagtaaacaccaacaattaattcatttatttactcactcaggttagaacattgtgttttcaagtttctaatattaaatttctttttcttttttctggaatagggactatcttattcagctcaaaataccatagactgaggcttaaacaaagacatttgtttcccaccattctggaggctggaagtccaaggtcagggtgccagcctgcatggcgagggttctggtgagaactttcttcttggcttgcagatggcagccttctccctgttcccttacttggcagagagacagagtgagccctggcatcttcctcttcttataaggatgctatattccatcatgggggcccaaccctcatgtgcttatttaaacctaattacttcccaaagaccccacctccaaatatcaacacattgggagttagggcttcaacccatgaattggtagaagggcgggaggtggacacaaacgttccatccataattctagctggtaacatcattgttagaatcagttgccttgccagtctcagaaaacaggacactgagatgcaaagacatgtacatttccatttgaggcaggtgccaggagacaactgagaggacactgagtttagaacattggatcaggcattgagagggaatctgggttgctggatgcaagaggctagtaaggggtgatgagagttcttcacataaatcaacctataactcacccagcctctgtgtcccaggggcctatccattattgatcaaaatgtcagtagaccttttgggttgtgtttcaaagagtaaccattatcttagagattcatagcaaaatatgagtggttcccagtaaaataaatcagagtttcctttatcttagctagaaacacctattgggacttttgtcaaattatttaggggaagaagaaggttgaaagcaaacttccaattgaaaagaagcatatttattgaagttcagagggctggagcgttgttttttgattgacaaaataatgaactctctgataagagtccagaattagttggctgaatttgtattcatttctccataaatttgccaaagttagaagagaaaatccatagaggccaaatgaagaaccatttgattaagcgtgttatcagcctggttgtggccaaattccacctcatatattcatgcacacattctttgctatgagttgcatatgtgctttgtggttgtgggcagatttaggtttgtttttctttctgagtcttttctggtccaaaagctcatcatttaaagttttggaagcaatttagaaagctattagattcccaaccccctcccgacttttggaacacttgcagttatttttttctggcacaaaaacaatcaaaaaggaaaaaaatgtcaggatatcttccaaagagagacataaaggtaacattttatttataccatgatttgtttattcttatttgttgttaccataaaagttatttaatttttttgaactgaaaggcagatgattttaggggataaaaaacctaaaataagaagtgttgctatgtgattacagagaatagttgcttttgttctgcctgtgtttaattaaagcaccatttgagaaattcaagaatcaggtggtaccgttgagtcactggacacatttttaagcaccatcttgaaatgtgatataaattgattttaaattttaaatttgtaatcatacacttcctctaaattgggaatcatgagagcatttctttttaagtagtttgtgataattttggaatttgaaagaaactttaaaggtaatgtatttaaagttactcacagaaatatgctggatgtgttgactggtaactttaaacatgtttatattgctatttttctagcacttgaaaagtaatcatgttttatagccaaagtcatctcctgtccatagaacaattaatagtcataattgatagttttatgcatgaaaattaagtattgctcctgcaaaactgaggagttaatgtctttacgtgctttttcacaaacattccttataatggaacaccaaatgcctacaatttgaacacatggctggtggaaaaaaagaagaaaaagaaaatcaatcctaagccagaaatctgaaaaaagrcagtgactttgggtcattttgtaatcatctttggtgcttcagtgactaaaaaatacatgcagagtgcaagagcaccttgctgaatcctacaccctgccctccttgtgcagttatgttacatgcaactccaaagcctccacagctgttgtctctactctccattcaaaacaatgcacgtgcaactttcccttgtggctggcttcgtcctccacacaccaatgctttgtgtgaaaaggtttcattaaaattgagtttagggtaagtacgggataggtggagaaaagattttcttctaatgcttctccagaccacactgtttagccttcaggagacccaggaattgatatgagcaaaatgtttttacacatgaactgttctttaatcccttttttgcttcttcaatccttgaacttcattccctttcttttcattaacatttacaacacacactttacagggaaagaaagtgaaagatatgtaatgattctgcctgctacatctgactgtactccatttctcacattctatcctcatctttttctagccacctgagtcttcagacagttttaccatcttccctattttaaccccaatttaaacatccacaggaagccaaacaaaatatgcccatctgctccagatgtgtcaaatcaagttctgctattttaatttttttccaggcaaaccctccaacaaatgtataaacaggttgctttttagaagaagtaaagattaatgtctctctgggaaaaaaaaatcccatgcattttggaaagtctggctgttttccccttcaaaaaacttcatgtaaactaaatgcatggcttgatcctcccatgtaccagaaggggagcagcatctttgagctctcttcccaaatcctctgcttggtctgggcgtatcctgtgaatgaggagagaatctaccccacagccagatgcttgcatttggccacagttcatttccaggcagcctggaagagagcatcccacaacattgaacagaggcagccaagatactgtcgggtgatcaggacagctcccgcctctgtgttcctgtggagcctccttcctctccaaggaatttgtcgcatgggactgcataattcagttgtccattcagtcaacagtgatttactaacaacctactttgtgttaggcactgttccagggtctgcgcattcagcagtgagcaaaataacacaaaatgcttgctctcatgaacctggagacagacggtaagaatatacagcrataggcaacatggtaggtggggatgagtgctctgaattaaaataaggcaggacacagagatggagagtgacctggacaggacagggttggcagctcagaagtgcattatctacagtggtcagggaagcctctccagtgaaaggacattaagacggagctgaaggaagggagagagtggatgaaagagcaaaatccctggaactgggacatgcttggcaggttgagtgtccacaagagccccaattaactacaggagggtgagcaaggagagagtagagggagttgaggttagagaagtaaccgtacgtcaaattatggaggactgagtttctcaaactccagtgtctgcgcaaatcccccagggatcttgtgaaacsacaggccttgatttagaagatctgcggcaggcccagggtctgcattcctaccatgcccccagatgatgcccctgcctctaccgttccccagaccatgctttgagtagcagagatgaaggccttcttgcccacagtacaaattctgctatttctttcctgttaatttgaattggtatgcaacaactgtacatatttatgggataagagtgatatttcagtgcatgtatacagtgtgtaatgatcaaatcagggtagttagcatatccttcactgtgaacatttatcatttcttcatgttgtgaacattcaaaatcctctcttctagccttctgaaaagataccccagagtattgttaaccatattcaccctacagtgccacagagcactagaattcattcaccctatctagctgtaactttgtatctattaaccaaactcttttcatctttcactctcccatacccctccctgcctctaatgactacaggtctatctctgtttctctgagttcaatttattttagcttctacatatgagtaagaacatgtggtatttgtctttctctggctggcttattttagttaacatgatgttcttcaagctgatccatgtttgctgcaaatggcagaatttcattcttttttacagctgaatagtattccattgtggatatgtaccacattttcttcatccatccatctattgatggacacttagattaaaggtactctgcttttactatgagtgaagtggaaattttttgaggcttttctttttatgagacaggatctcattctgtcccccaggctggagtgcaatgtcacaatcataattcactgcagcctccactcccagggcacaaatgaccttctgcctgagcctactgagtagctaggactacaggtatgcaccaccacaccctgccaatgttatattttttgtagaggaaggttctccctgtgttgatgaggctgctttggatgcttttaaatagwggggaaataggatcagactcatttttagggagcccctctggctgctctgtgaaaayagggcaagggaggaaataggagacctcctgggagataactggagtagtctgggtgagatacttcagtgccagcatctaaggtacttgcaggtgggacagccacaacgaatgccacttcaagtgaatgtgaggatcagctctgctgcccaygtggaaacataagtaaggttgttacctgtggccttgcagaagcctgcaagtcaaaggccttttgatggttggtgaaaatcacatctgatatgcgtgattccaggaagctcatctgcctcattcctgaatttaatttctatccatgaygcacatattactattgcattaaacgtgaagtcattgcctcctgccattgtaatgtatgcatgctattgcagaggaaatgtttttatctacctcccaaataagtaagcataacttgagctcgcattacaaaatgacacaataaactaaaaaggaattcatttaatatttttaaacatgattttggtgtccttatatttagggaaatattttattgtaagttcatcttacaataaaatttataagggaaagatattttattgtaagttcatctcaggacaagaaacttcacttggcatagaaattaacatccaatctgcagcctgtcattgtagtgagatagtcttgaattccctagctaagttatttacctaaacaaagtcttgttcactttgaatttcctagctaagttttttacctaaacaatcattatatatgtttcaaaatatttaaatttttcccttccctctgattttataattttcttgataaaccttcctaaatatctttaaatttcactgatctaatggttcttaaccaggggtgattttgccccccatcaagggatatttaacaatatctggtgacatttttaactatcgggagttgggggatgctactggtatgcagttggcagaggccggggatggttaagcattctgcatacctgggagggccttccataacagaggatcgttcattccaaaatgtcagtagtgccacatttgagaaaccctggccttctggtgaccacaaggccttcagctacagaaaataaaattcaccaaagatccccacagccatgctttgaaatccttcacagtttgcactgagccatgcttcccacaggctgctccaatgaaggggattactctgaaggccagctttggctcctggattctccaacatccgtgccaaacctttcttatgcagcacagtagcctcagacatttccagctcactcccacttttctctcaggacatttttcctataaaattcttgcacatttaatctcatttagaatctgtttctcagagatcctggattaatatatcatggcattaaatcattgaaaataatgaattaatgatctttcctcattgtagtgatatgggaagaaaacgttctgatacacagaacacagaaatggctcagaaatgagaaactgactgactactaaattgttagtaaaagcaacagaataagtaagtgaaaaatagagcaatttggggggaaaaaaagttgagaaaccccaatcttcaaaaaaaggataaaagtcttagcttttgttcatgtgttatttaaaacccaactcaggcctcaactgaaacaactaaaattaggaaccaaaattgcatcccctgcccattcacacttttggaaccagagtggttctggacatagtcatgaggtcatcattcctaattagagtaggaatttcaattcttgggtttctaacccaaatctcgctatcctcagaaagcttgacagtatttgcagctctgcccattagatgagatctaccctttgcctttggtcaggaagagtcctatgtatggacacatcaccacagaccactcagattccctcttaccttccctaggacactctgcctcccttcctcctttccatgatactcatcactctgggtagactctgcccaggcaacaattgccctctgtggtttgccaagacccatcctgctttctgggaatagatgagtccctctaaagatgggcatgtccccagccacccaccactgtgcaggtggcagctgacgtctattgtcctgcaactcacatatcctgatctctgctctgttatgaactccagccagagaaatatacagatcttattcctgattcataagagactgtgtttgccttggatttaaccaggtctgatgactttcaggatttattatgttgatgaataaagggaaattctctcccttaaactaacacaatgatctctctgaatcagattctccctatacgcagccagcaatactagagaagccccagagacgctgctacttgagggctggcctaccgcagagctggcgtttatgttgtgatgataaacattcttgaaaaaaccctgaaggagatcctggcattttcctagtgcctttatgtgccataccgagtgcaagctgcttttcatgtactaactaatttaattcctgcaagagtcctgtggcatgggtatttcttattcccattttactgacaaggacactgaggctcaaaaagttgtttttttgttttgttttgtttttgagacggagtctcactctgtcgccaggctggagtgcagtggtgtgatctcagctcactgcaacctcagactctctggttcaagcaattctcctgcctcagcctcccaagtagctgggattacaggcacgtgccaccacatccagctgatttttatatttttagtagagatggggtttcactatgttggccagaatggtctcgatctcctgatctcatgatccacccaccttggcctccgaaagtgctgggattacaggcgtgagccaccacgcccggccaaggctcagaaagtttaagtgacttgcccaatatcacaatgttagtaagtggtagaggtataatttggattttatttgaattggaaaaggctgtgatctttctaggtgatattctaggtaacactagtttccagcaggcactctccattacctgcgtctgttaggtctgagtctgctatggttttctgactgatgtgtagggtaacacaattaaggaactctccactggaaggccaagtctccactcaggcacgtaggtagctggcagtcctccttgattctgctagccagagccagcttattgaaaacaaaagcagtctgttaggacagtgcccagacttctgacttcactacggaggctaggaaccaagtcaatatcatcagtcattactttccatcaacctctatcatttacatgcagtaggtgctcagtaaatgctgataaattcctgtatgaataataaatgaatgaacaaacaagagcatttgtctgtacaagttacagagttttagaatagaatgtaagtgtgaagctcgataaattcaaacttctgcaatatccccaccaagtggttatctaaattccgtttgacttcccttggcagggaatacgcacgcacactttctaaaggagtttttccacttcatatgactctggctgttcagaaggaatcactaattaaatgagatctttgaaaaaagtcaagaaactggaaataagtaggaattgctttacctgatgcttatcagcttacaggctttactgctccaaaaatttggttcgatttgaaaacattatgctaagtgaaataagccacacacaaaagggcaattattgtatgattccttttatatgaggtacctagaataggcaaattcatagagagagaaactagaatggagattcccaggggccgtagagggagagtagttattgctgaatgtgtttggggtttcagtatgtggtgaaaaattctggatacagatgctcacatgtcattgtgggtgtctttcatgcaactgaattaggttttttttttgtttttgtttttgtttttttttttcagataaaccatgaatcacattttatttattttgtcctttcatttttttttttttttttttttttgagacagagtcttgctctgttgccaggctggagtgcatggtatgatctcggctcactgcaacctccacctcctgggttcatgctattctcctgcctcagcctcccgagtagctgggattacaggtgcccaccatgatgctcagctaattttttgtatttttagtagagacggggtttcaccgtgttagccaggttggtctcgatctcctgacctcgtgatccacccacctcggcctcccaaagtgctgggattacaggcatgagcctcaacttttattttacgttcagatggcacatgtgcaggtttgttacatgggtaaattgcatgttactggggtttggtgtacaaattattttgttacccaggtggtgagcatagcatagtacccaataggtagtttttccctttttttttttttttttttttttttttgagacagaatctcgctctgtcgctcaggctggggtgcagtggtgcratctcagctcactgcaacctccgctcctgagttcaagcgattccccctgcctcagcctcctgagtagttgggatgacaggcacctgccaccaggcccccataatttttgtatttttagtagagatggggtttcaccatgttggccaggctggtctcgaactcctgacctcaggtgatctgcctgcctcagcctcccaaagtacttggattacagccacgagccatggcacccggctggtagtttttcttcctcatcctcctcccaacctccaacctcaagtagcctccccccaacagtgtctattgttcccttctttgtccccatgtgtacttagtgtttagctcccacttattaagtgagaacatgcagtatttggttctctgttcttgcattaattcgtttagacatggcccctccagctgcatctatgttgagcaattaaaaaaggttaagatgagctaagtgaggtggtatgcatctgtagtaccagctactcaggacrctgaggcaggaggatcacttgagcccaggagttcaaagccagcctgggcaacatagtgagaccccccccatctcttttaaaaaatatttcagatgataaattttatgctgtatgtattttaccataatacaaaattggttgaagaggagtacatataaacacaacaacgaagtgtttaactcatcaatttcagatacacagtaaaagaatgtatatgagaattggtcaaggacattctgaggctttaagcttcaagtcaagaaaaacaactgcctttctgaaaacttacaccgctcacagagtctggtgggctatgaatttgatggtacaacttctaacttgacagtgtggagatcaagggtataggaawggtaaaaagctttgaaaagtttgagagtggagtttgcacagctggacacagggcaccacaaacacaggtggtgcatttgtgcctttggtggacaaagtatcacccacaatgcacaggcgcttccctggctggacaataggtctctctctccatcccctctctctctgtttcaagagaagacattttacgtaggaccttccactctgaatatgaagggtatatcatttccctctcaaatccagactcctctagttgaatggctgacagccaacagaaggggtgtatgcacccttcattaggccagatttactgtccgccttccatgagtggttcagcatgctctctgtccagctgtggctcctgcctgcaaagcgtgccatcagcttcctggttcagagagagctaattttctctaattgcttccaatgagaggtgggaggcaggagggtatgtgccccattcagagccgctgttctcatcagcctcaccaagcagtgagagcagctttcacattcaaggtcttctttccattatttgggtaaaaatgttttgtctcataacctgggatttaagaatcttcaacaggttgcttaacccttaaagatctgacccacctggcctttaatagatttaaagactttatttggttttatgatttttaaaggaatcataattcctacttatttaagaactttaattcctatataagaataatttattctcattcatacttgtaaaaaaagtgtatccattgttttagaaaaggggaaaatagaagacaggttaaaaaagaaaactaaaaggcatttggtgttgcttagatgtacatgttttgtagtatatatatgtggttttgatcataaataatgtatcaaagacatataataccaatttctgttcttttttctgaaatcttagaattgagtccttagaagaaataccaagctaaagggcatgtgaatttctaagtttcctggcacttaattccaaattgttattccaatttctagtgtgccatactacatctttattagcattcaggattatcttcttggttaatatagtaaaatatcattttgttgtttgaattttcattgctttgataattgatgrtatttaaagatgtttaggctctttttttctttttcatttgctcagcttttctgaaaacctttaggagacaagtttctcccaaattttttctactgagatttatgcattactgatatgacttctaacatataagctagttaacatcaagaggattagtctatcacaccacttgtcacctggggcaaggtagtatccagttcattagggtaaaggtcaagtaagtgttttgtttgtttaaaggggaacacgggtaggagttatcccaaagttagaacgcaatgaaacccaactatatagtaaaatayatttggggctcaactctgttagccatcaaaggtagtacaaaacatcagaagatgaagagggttttgaaagaaagaagggccatgtcagattaagaggtagaggaacatcaagataatttttcttctattagagtttctcttttagggtttctattagagtttctctaatagggggtagagaaacagcaagataattttttttctattagaatttctccattagagtttctcacctgcaaggtgttgactttccagttacctggcatttcattctactttttggaatggcctgagctgaaattaatcaggctctgttgatgatgcatccaccagggtttcccaktggatgcttagaaaaaattccatcacagaatatctgtgtcttgtcttcttgggggctaggagatcccccaaatttttctcttctgttcttgtttgataaaggatgtgtggaggacctggtgcttragagtttcagtttgacataaaggtactagttctggagagtctcttgggccactttatgttaacaaagactctcttgatcagcctttagttaagcttctctgagctctctccttgactaggcttcaaccttgggcttctgtgtcagtccttgtggagtctggttttagcaagaatcttgcaaagtcagtttagagagaataccccaccttttatatctgatcaatttcctcaatccccacctgtaatgtataagcccttgacctgccttgagtagaaatctcctacccttcatgtctcctcctagtaattttccatccactgaccccacactctgctctttgactctaaatcttcatttgtccttgttgtcttcaatgtcgaggccaatctctttcccctaccataatatctctattgaaatagtcctgaacaaagtcttccttgccattttcacacgtgccagaataatgcttgcctccctgcctgcctgccttccttccttccttccttccttmcttmcttccttccttccttccttccttmtttcyttccacagaatctcgctctgtcacccaggctagagtgcagcggtataatcaaggctcacagcagcctsggccttccaggctcawgtgatcctcccagctcagcctcccgagtagctgggaccacaggcacatatcagcacgcttggctaattcttttttgccttttgtttgtttgtttgtttgtagagacaaagtttcactatattgcccaggctggtctcaaactgctgggctcaagcaatcctcttgcttcaaggtcccaaagtactgggattacaggcatgagccactgcacccagcctcacaattttttctttaacaatgcccagagcatatgctgagcttcccgtcactctctggggcggaatggaatattacacaactggcacggtaaagaatgcacttggttttggtggtggataacattttcctttgcacctgaagcacttccacaaatagcccatttgtcctccttgcaattaaattagaaaaactgtctctaagcttggtttgacctatctgtagctctttgaaaagactgcttgatctttcctcactctccgtgtacctaaatcttgttcaggctctgtccagaaatcaataggaaacataaaaccttgaagcattataaaatcaggcattctaaactggaaagggcctttgattatttagcccaaatgcatcacctgttttacagacgagcaacctgaagttcggagagstggaacttcctccaggtcatctgctgcactggtgatagaggcaggactaaacactctcggtgcagtgttccttctctgagtcatgttgactactatatgctcattcacagtcacaaactaaaaatctcagacaagtcaaaagcatacaattacaggaccagaagactcctcagtgattatctgggagtccaggcatccaagggacttgaccaagtttttgcagctattgctggtagaccaagtacggaaatacacttctcttgactctcagtctagtgctcctttccctgcagtactctgtgcaataccaaaagatatggatctccaggattggctgaggttagcaattaatatggtatttttagtcatgtctacttggagtagggggtgctgatttttgtttcatgtgtgttcttgagactttttgatgaggttccgtatgcctcactctaggtgatgtttttattagtaccatgttgtcttcctataaagagtttttatggcgaacagaaagctgtctggattcttgctatggttgtaggcaggagggaacatggtgtgtggcttctgaacaaactctggctgctctttaagttcaatgaagtgaaaaaaaggcaagttaattgactacagacatatgcaagagagctctcaattgagccataagatcttttggratgtgggtgtttacaaggtagctataagcactctcataagtactgcacctgtgaatcatggactttcattgtacatagctttccactgcttgcttcttgaggctactgttcagcccatcagtaatttttaaagatcctttagaaagttatatagaggaatgcaaatgtgagtaaacaaggcgcctctacctactgatggcatcttcaatatttacattggcccgttgagttttatcagctggatattgctataaaacacatcacctgaaaattaagtggtttgaaataatgagtatttgtagttgttcacaaacctgtgggtcagctgggcggtgctgcagatctgaaccaggtgtggctgatcttgaatgggctctttcctgctgcggaaggcagccagcaaggtaggtgggggctgatggtcagggatggcctcactcctatgttttcccattggctgactatcagccagggctgcagtgatgactggtgaaatagtttggatatttgtccactctaaatctcatgatgaaacttgatccctacagttataggtggggcttaataggaggtgtgtgggtcatgggggcagatctatgatagatggcttggtgccattctggcaggatccagtgagttctcactcttagttcttgagagatctggctgtaaaaaagaacctggcaccttcctctcctctctttcttcctttctgtctggccatatgatgcctgctaccctttaccttccaccatgagtagaagtttcctggccgggcacggtggctcacgcctgtaatcctaacacttagaggccgaggcaggtggatcacctgaggtcacgagttcaagaccagcttggccaacctggtgaaaccctgtctgtactaaaaatacaaaaattagttgggcatggtggcgggcacctgtaatcccagctactcaggaggctgaggcaggagaattacttgaacccgggaggcagaggttgcagtgagccgagattgtgccattgcactccagcctgagcaacagagcgagactccatctgaaaacaaaacaaaacaaaacaaaaaaaacctccatgcttcttgtatagcctgtagaactatgagccaaataaacttattttctttataaattgccctgccacaggtatttcttcataacaacgcaaatgaactaagacaacaagtctctgtgttctccttcatctatcatactacccgaggtttgtttacgtggtaaagacaaggttcggagagaaatggttgaaaccagcatagcttcttgagacacaatgacacttatgccacatgctattggccagagcaagtcacagaacatctggattcaagaggagggaaatggattccacaccttgatggaggagatgcaaagtcatatcacttgggacatggatacagggaggggtgcaatttgggatgtttttgcaattaacctaccacaggcttaaggaggcttttaggatttaccttctgctctaatgagtttcaaccaccatggcttagagaacatttcttaaaactcagtcatctttcatgtatccattgttctccaaagggactaagttttgttccatggtcagtcttttccatgtgttcttggaccttatacaaaacccaagcctggaattacagcacctggatttattcatcaagcattcgccagttcctggttctatgcatgtgttcacaaaactcagaacagggcattcctctgaatagagaagaaaaatagagtcagtcagaaaagaaattttttgtctaagaatacaatccaccgtactaccaccagacttggttccctttcaatgtcgagagtaacacattccttttatgtgttgcttaatttgcttgttttaagcagttccttgtttttggagtgtcttttttgataacattgagataccacatccactgatcatgtctaaaagctgacaatttctgaaggaaataaactgttcaaaattaactactctctcactatatatatagcattgtattttcagtacacatttttggtacacatattcgtggtacatattttccagctggcttgtgctaatgtactagtgattagaaccaagactaagaaaaaagtgcattgccattttcaatcaacgtgggtagagctgaatggttgattccaaatcaagttattttgcctaaagcaagacagataggagagagagagagagagagataatacagagatagataatcacaaactgccatttagagaaaatcattactactatcaattataagagtgattagcaagtttatggatagcatgatggctagcaatctttatacaaatgtggctgattttcactaagtcttttaattctcagaattgtttcatgacttttttggagaaaattgttgaggcatgaaaagaatttcatgactgagatagatattgtaccttaggaaatataaaatttaacaaatctgtagaaaaggaagacttaggctttgactttaaaagcccattccacttacaagatttcattttttgtttattcaatttggaaagcacattttcttatataatcaataagaagatttttatggcatgctcgagtgtagtctgattccaggtctcataattcctttgcactcaaaaaaggaactttgttacatcttgccactcatgctcactcttcagtgggcaaagtgactttgccatactgtcaccatccttgagccactgcccggtccttgaaaactaggattcttcatttccttttgcatcgtcagcgtgaggaaggggagggggaggtaagattctggacagctggactgaaaacaatggaaaatccctagtaacagcttgaatcactcactagcaggaggaaaatgtgactcgtttcttttcctctttagcttttgttgatttttttcataatgagctcagaaagagggaaagatcaatattcatgttgagttggtatccatcatagtgatattcagtgattataactctccaattctcactaggacaaatataaccacgcaaactggctaactgcacttgctggcatggttcctttggaaactcctggatttctctgaattacaaacagaaggagagttatagattttgtctctttaattttctgtctcttgaaatctcagatcacaaaaattgagtctttcttaactggtgatttcttattcgtcaatgactccttaaaagatatgcagaaagtaatggccctctaacccttcacctttgtaagctctttaatcctgaggggatggacttcctgatttctgttctctcagattctaaggaggaaaagactagctgttgtctctcaagtctacctattgctgtcctacagagcaaggacccctcttgttctccagctcctcaggaataggattcttggttccctaactctaaaataggagctcacaaggttattgtcaaggacaaatgagggcagtgttaacgtattaaaaaaaaaaaactagtcagagattgcttgattttcaaacttgatagtatgctttcgaagttacataatcaaaattatagttgtatttaaaatgttaagttcagcttacaaaccttcttaacctatttgtaagtcaagcaaattttaaaaatccttcttaagggaagcttgattaatgatttcttctcattttcaaatgtagttaaacatttttaaacacttaaagcttgatttgtaaatttaatacatttaattttaagtactttagcttgtctaacttaacaaatgagatactcatgaatatttgaatagctcatcaattagatacttataaatatgaaatatagtttttaagttcttttaaagttctcaatgtacttgtaaacttgtaaggatttcaggtcaaaacgataagtttaaatcatttactcgatttaacattttaaattggaagcacaattctaattcactattattttaataggccaaaatatcttaaaattacaagtatataaaatatcagggccaggcacagtggctcatgcctgtaatctcagtgcttttggaggtgaagccaggagaatcactcaaagccaggagtttgagcccagcctgagcaacacaggaggaccctgtctctacaaaaaatacagaaattagccagaggtggtggcatgcacctgtagtcctagctatttgggaggctaaggcagaaggataccttgagcccaggagtttggggctgcagtgagctgtgatcacaccactgctctccagcttgggtgatacatcaaaactctgtgtctataaagataataaaataaaaatatgactaatgcaaaattatttgatactatgggtttcatttcatacagtcatatgaaatgaaataattatgtatacaattatatatatatacatatatatagagagagggtgtaaatatataatttattcttaatgctcaatcttatcagagctgaaagatggttacccatgaaggaatcaatgacaccatttcacatatgattgcagttaccattcccttgtagktgctgggctagctctctcagctttccgagatttttttgaggctcagaggacctcctctcctgaatgagaactgggttctaacgaatgaccctaactgtgccctgttacagtggctctgtcttatgcccacgtgaagtgatgtcacagaccatattcacgatatcgaagctacacattactaaaccttctgccgacccacagaagcccaaaactcccatcctcatagtcatatcaatggattagattttattatatttgctgcaaactctttttataatgttcttcctactcaccttattcttatgtctattctattgagatctaattaaattatgaatgtctcttaagactctatctggctttatagtgacaacatcaaaggatatttgtattagttagggttctgcagagacacaggatgtgtgtgtgtgtgtgtgtgcatgcatttgtgtgtgtgtacacaagtcccaagatgtacaggttatgttggcaagccaggagaaccaatggtgtagttcccgtatgaaagccagcaggctccatacccaggaagagctgacatttcagttccagtccaaagtcaggaaaaagccaatgtcccagtttgaatacaatcaggaaggagaagttctttcttattcaggggaaggtcgccattttgttctcttcgtgtcttcaactgactagatgagatccagttacatgaggtagggcaatctgttttagtcaatttatatttaaatgttaatctaatctaaagccaccctcacagaaacaccagaataatgcttgaccaaatgttgggtctcctcataacrtacaaagttagccatcacgatattttcctggcatacactgtgaaaccactgacctggaaccctctgacttctgtcagctatttaatagataagtctttctaatcttgagtgtttgtaaagcagttggatataaatttgaaaatttttaaatgaaacgataaatcatgtgtgacctcttgagcctattaatcctaaagtaaaaagtccttgtacaaatttttatccactttttttttttttttttttttttgagacagagtctcgctgtgttgcccatgctggagtgcagtggcaagatctcggctcactgcaacctccacctcctgggttcaagtgattcccctgcctcagccttcctctcaagtagctaggactacaggtgcacaccaccactcccggctaatttgttcgtatttttagtagaaatggggtttcaccatgttggccaggctggtcttgagctcctgacctcaagtgatctgctggcctctgcctcccatagtgctgagattattgctatccactcttgatactgtttggcatgtgacttaaaacaagcaacagttgaaaatataaactagaaaatgagcatatatgttcattgttgctaaaggcttggtaccagcaccagctacaggagtttatagcataccttctcagagaaaggcctcttcattctgggtttagaggtgttggtatcctctgttgcaagatgttattcaatcaattcaatcctgagttttcaacatcagcaacattacatgtgcatttacaggaagaagaccagagtaggaacactttcattttttcccccaaccatctacaaaaatgaagattacctgaaatgtttactttatactatgatcttaaaactatttattttaataatatctatataacccagatcaagaaaaccagtgaaaattagcctattcaatcctttcaaaaggcttttttattccaaaagattgaataaaattagttactccctttatcctgaatttcactacaaatattacatttgcaaatgtcccatctgactgtaataaatgccagtgactttaactctgtggttggtgatatgaagaaaaccatatgtgatagattctaaatatataaccacaaaagccaaactgacggtttggaacatctcagcaactattattgattactacagttgaagaggttgaatcagtttgcatggcaattctcctcctcttcttcctcccatacccactcctcctctttcttatttttctctcttgctytctctctctgttctccattcgttgtttctttctaattcgcagtagcagtagcagcaaccagaaaaatatttgagaactttaaactaaatggttaactaataaggcaataaatagaaggtgtgacactgaacgaggagtaaaagccaatgcattccactacattgagagacatttatgaagtatattgagttacacagacactaacattcagaaacaataaaatagagacagtgtaaaaggctaaaaatgggctgggctcggtggctcacgcctgtaatcccagcaccttgggaggccaaggcaggctgatcacgaggtcaggaatttgagaccagcctgaccaatatggtgaaaccccgtctctactaaaaatacaaaaattagccaggtgtggtggcacacgcctttaatcccagctactcaggaggctgaggcaggagaatcgcttgaaccygggaggcagagtttgcagtgagccaagatcatgccactgcactccagcctgggcaacagagtgagactacgtctaaaatataaaataaaataaaataaaataaagactaaaaatggcccccaaaagatatcaggttaaatccctggaacctgtgattgttccgttatatgataaaatatatgatttagttaaggatccccagaggaggagcttaatctaaattatgaatgtagtaaatgcaatcacatgggttcttctaagagagacagggggtgttttgagatagacacacagggaaggcaatgcaaaaatggagcagaaggggttatagctaaaaggaatgccaagggccaccagagctgtgagaggcaaggaacagatttttccctggagcctccggaggaagcaggccatgctgacacattgattttgtccttctggcccccagatctaagaatatatttctgttgtgttaagccagcaggtttgtagccatttagcagccacagaatactaatatggacaatgatttctgagaaaataaaaagattattttgagaaaataacaacattccttgtttgatttttaggaaaagccattttattttaatttttttctatttttttatttttattttttacattgaggttctctttattttttactatttcttttttcttttcgtcttcttttttttttttttttttttgagatggagtttcactctgtcgcccaggctggagagcaatggtgctatctcagctcactgcaacatcygcttcccgggttcaagcaatttcccacctcagcctcccaagcagctgggattacaggcaactgctatcatgcccagctaatttttgtatttttgtagaaatggagtttcaccatgttggccaggctggtcttgaactccttacctcaggttatcagcccacctgggcctcccaaactgcttggattacaggcatgagctacagtgcacagcctatttctgactatttcttgacggccatccatgctgggggaacaccctcatgtgcctgtcaagcccaaatcccactctaaaaattcagattcccttttctgactccgtaggatgcctgtccacggaggtctcataaatccccaagcccacattttccccaagtcctccccctgctggttacctttcctttcccactcacatggagcaggtgtccgaaacaatgggttttgggcagaaaacgcattttagtcaactgttgtataaatattctaaactagtaattaagattttaagcatgtgctctggctggtcatggtggtcagattgcaaacagttggcaatcttatttcagcagtagactagaatctggtcataatttatccaagggaaaaaagacttgtcattaaattctctccaacggtcctaaaattttaatttatccacgcctaccttgtccattactgttttaaaacagctttttaaacgtctagattccagccctgtgtagaatcaaatatattagaacttagtcttgttacttggtctgaattggaaacatttccagtgcctaccagttgcacacatcattatccactcataattagttgtttaatctgaaaagagcaagttctgctccatcacctaacatctgttcacttttactcttagctctgttcaaccaaatcccattattgtcaggagaggctctggcagacttgtatcatttacgaatggtttctatttctttgtagatttctaattctttgttctcgtagctgctacattctctgataataaataacattatgcagttatttttcggaacttgtgcttgttttcaaaataacaagactaagaactaaagatttatttgtctgaagtcacacagtgcctcaaaacatatctcaaacactaaaaatattaacatccacaaactaacacctacttataaaaactctagcaattctgagagaaatggattatttacaatcctctctctgctgatgttactgttaaatgtcatattaactcccagttatactgaaaccattttaaatgttatagtactttgaccttggttgtgaaaataaagtgtctagtgtaattatttagggatagtatagttcctaattaagacaaaattttcagcaaagatgattaaaatttgataagcttttaaatttttgtgtaatttctccaaataatgaaatgatttctttttctaaaaaaatctataaatttccagactgaaatatgcatgtcagaataaaggaaaattttattatggatctgaagtttgctccattttataacacatctagaaaatttggggtactggcagagtgaacccacagaagagattctgatgaaactgaaagtggattggtaggaaaattgctttacaataatctctactacttgcttttcatgtaggggtttgggaattagtctcttatttctacaactttctatttaactgaaaagacctaacatcttataataggattacactttctggtagaattttcatgatacaattcatttaaactatgttctttgcatgttctgatgaagacatttcctatgatggcattttggtctttctatctccagggaagtcaagtgattggaaagaattttaaagagacttgggctgagtgcagtggctcacgcctgtaatcccagcactttgggaggcccaggcaggtggatcacgggtcaggagttagagaccagcctggccaacatggtagaacctcgtctttactaaagatacaaaaaattagccaggcagggtggcaggagaatactcaggaggccgaggcaggrgaattgcttgaacccgggaggcggaggttgcagtgagccaagatcgcgccattgcactccagcctgggtgacagggcaagactaggtctcaaggaaaaaaaaaaaaaaaagagagagagagagacttgatggttttctcttgaaaaaataatctcttagccattttccactgccacgagtacatgtacattgaaattagtgatactgaatttatcattggcaagatatctaaataagatttactgtagattaccagcgcattaaggagctcctggacaaaacatgtgcacattttctggctgagaagtgcagtcattgaagatttgtagaccagaacataacatattgaaccccatatctatctatatgccagtgtgtgtacttacatattaatttctcctatgaaagaggaattaataggaaaagaaaagcaaggaagtaatgttcaaaacttccttaatggccaggtgcggtggctcacgcctgtaaccccagccctttgggggrctgagaggggtggatcacctgaggtcaggagttcaagaccagctgaggtcaggagttccagaccatcctggccaaactagtgaaacctcgtctctactgaaaatacaaaaattagctaggcatggtgtcaggtgcctgtaatcccaactacttgggaggctggcacaggagaatcgcttaaacctggaaagtggaggttgcaatgagccaagatcctgtgccatggcactccagcctgggcgacaagagtgaaactttgtcccaaaaaaaaaaaaaaaaagcttccttaaaaacaaaaaaagcttatgttgccattatttgggctattgatttttttctagtgcaaaacatatacatatttgatatataaccttggaaaatacacaaaagacaataacaaaacactcaaagtcctgctatctaaaaataaacactttgcttctagagttacttttattcatatttttaaaacatatttataggccgggtgtggtggttcatgcctgtaatcccaacactttgggaggccaaggcgggtggatcacaaggtcaagagatcgaaaccatcctggccaacatgatgaaacccccactctactaaaaatacaaaaattagctgggcgtggtggcccgcacctgtagtcccaactactccggaagctgaggcaggagaatcgcttgaaaccaggaggcggaggttgcagtgagccaagatcgcgccactgcactccagcctggtgacagaatgagacgctgtctcaaagaaaaaaaaattatatttataattatagtgagtattccatttctgtgtcctgcctttttgtatttatctaaaatttaatttaaaaatttctagatttctctgtaaaatcctgggaaaatcaaggcaagttcatagtgatctatgagtaatctattgaaatagcttggcattacataaaagcaatcccttcaggtctgaataaaaccataaatagaattttccttttggcatttacttcattttagactcatttaaatagtaggtttatcaatgcagtttattctgagcagagggatgatgtaatgtataatcagttactcaagtcaaaatgccaggaaagtatatgaataggtagcaacaaggtattgggttgaaaagaaaatgcttggctggctcttagatggcttgccctttagttgctactttccttggaccctttccagggtctccaagcatgaaggacccatctctcaggaagaagtccttgcccagggctgtttatcttagttgagtacagccaagtacaaaccagagcgaagttgggtcttgatctcctattgggtgccactgtctctgctttcttttatggctaacaagcctatactaccacaagccacatttcatttgatagcatgggtagtggaagagagcatccaaagccagtcaatcctaaatcatgtctgcaaaaatatctgtaaggataaggcctggtggacctcaagaactgtctccctctagtaataatcatataacattattattttkcagtgaaaaattatccagtacacaagcagtctatgcaatgtaatgagaagaatgctttgcaactgtactactagaagcgaactaattcatgatttatttttaagtgattagaacccttagtttatctgtgagaacatcacttaaataaaatgttttaaaatatgcaatgcatatgcaatagcattaaagtattaaatagcatcttaaagagcaaaagaaactattaagaataattaagtggatttattggctaattggtgtttccacatgtagttatttctgcaattattattcatttgctgatttacatagagctattctctaaaattactctggcattaaatgaagttagaagacatctccagtttggaaaatctattaagcaaakccttttcaacttaaagttgaggtgatactgaatcaaggcctggcagaactgactayagactcagagggagtatgtttattgcttttaattcttcctatttctgtttgaactaacatggcaaaggctttcatmttccaaactacacttatccagtctataaaacaaagatgatattgtttcaactataaagcacagattaactttgggaggctgaggcaggcagatcaccagaggtcgggagttcgagactagcttgaccaacatggaggagccccgtctttactaaaaatacaaaataaccgtgtgtggcggtgaatgcctgtaatcctagctactcgaaaggctgaggcaggagaatcgcttgaacccaggaggcggaggttgcagtgagccgagactgcaccattgcactccatcctgggcaacaagagcgaaactcagtctcaaaaaaaaaaaaaaaagaaaagaaaagaaaaagatcgggtgcgggggctcacgcctgtaatcccagcactttgggaggccaaggcgggcggatcatgaggtcaagagatcaagaacatcctgaccaacattgtgaaaccccgtctctactaaaaacacaaaaattagctggggatggtggcatgtacctgtagtcccagctactcaggaggctgaggcaggagaattgcttgaaccagggagtcagaggttgcagtgagccaagatggtgccaatgcactccagcctggggacaaagttagactctatctcaaaaaaaaaaaaaaaaaaaaaaaaagaaagaaataaaaagcaaatactaccaaattcttacctaccagagttacgactgctataacccttaacatttaaacaagggaaatcatcatttgggaattgtatttcctcttcatacaaactagtcttccatggtaatagattggctggatgtttttccagtatgttttctagataaatagtccttggagccattgtttccctaagaattaccaaaaaaataaaaacagaaagcaaaaacatgtttgctttctgctggaacatacatctcaggcagtgccgaggactaaagataaatttgatacctatggaggaatacattctaaaaataagattttatatctgtttgcatgttaacaaaacttatttgtaaagacacacattctagaaagtaacctcaaaagtactcttataaagcacctcattttgaaagtcaagtagagcaattcctgggcagatgataatgatactgcagagacatgtgaagaaggaaaaaaartaataatttcgctccctgtgttagtctgttctcatgctgctaatgaagacatacccaagactgggcaatttataaagcaaaagagatttaatggactcacagttccacatggctggggaggcctcacaattatggtagaaagcaaaggaggcgcaaaggcacatcttacatagaggcagtcaagagggcatgtgcagaggaactgccctttatcaaaccaccagatctcgtgatacttattcactatcacgagaacaggatgggaaaaacccactgccatgattgaattcccttccactgggtccctcctgtgacacgtgtggattatgggagctggaattasagatgagatttgggtggggaaacagccaaaccatatcactccctaagactattacatttcagcagttagatgaagagagaaggacagggttcagattgaatcattttggatggaggagaacatataaataattgaacaataggagcaccacctagtttagagacaacctaccacaggcaaatacctcacatgacttcattgttctcccccacaccttctctaccatcagatttcacccagaaccctcatgtgccacagaacttcaagtaaataccagccctggaatactagtcagaaagctgaaaaaaacgtgcaatatgagtttgaacactctgagatcgttaacacttttttcaataaggttagataactaagatgataaataaaaatattttaaaacattaataaagaggaaatgattctcatagaattagtatagccaaattttatcttcttaattgttgtatttcatcaagagacatagataggattaattttggttttctactataactgcttccatcagggaaaatagattaatttctaaaataccaccagaatcttagagttgtttatccaagaatctctaaagacactttacattgcagagtaagtcaataacatgggcaaatataaagctagggaacatgtgaaaaataaaattatgagttacaaacattaaacattatttcagtagaaacagattggtggctgcagttgattattaaagaatgccattaagttgtcaggaataactgttgtagttttctgaaaatagtcattttgttgtagctttagattggattagctagagctatacacacgagagatgcacatcaggccttagacacaaattccttcaggaaaatgattcactggctatttagggggttgacagccagtatatgttgttttcgagtcacagagaaaattgtatggttgtatattctgctttaatttacatcaatggaagatgagctacaaagcagctattgatacaaaaggcaaacccattgtagaaaatgaacattttctgtaagctacatctacattcttcctgatcagaaaataatacagaaagtgacatacttgttcctttttcacatttgaagaaaatgttacaaatgcctccatgatgcaattctgtatttagacaatctaagcattgagtcttgggatacttattctgtaactattttctaagaataacctgaatagaaaacatggaatttggtagtaaaagatataaataatgaaaataggggtagggtcctgtgcctcagtgaagtttaaaatttaattgaacttctaaataaatgtttaaaaatagagcagtttcaaaaatacaaaagctagaatattcatagacccctgaagatacttctacagtatcccacagttccacaatctctgattcaggaaattacattaaaagttatatgttggcattttggaatttcatttggtatacatacctgcagacagaggcaataaaatcacatcaatggtcggttacaaatgaagtcatccagttgacccagggtatgctttggctaaattttgttttagatttkccctaaaatataattgcaatattgaatatctctaatagatctcaagggccctctattagtccattttcrtgctgctgataaagacatacccaagactggacaatttacaaaagaaagaggtttattggagttacagttccacayggctggggaggcctcacaatcatggtgaaagtcaaggaggagcaaatcacatcttaggtggatggcagcaggcaaaaagagagcttgtgcagagaaacctccattttgaaaaccatcagatctcgtgagactcattcgctatcatgagaacagtgcaggaaagaccggcctgcataattccatcagctcccacgggttcctcccacaacacgtaagaactgtggagttacacttcaacatgagatttgggtggggacacagccaaaccatatcaggcccactttgcaaaatatcaaaacagaggggaaaagtataagtaactgaagagaagggtgcggtgtgctgaatacaaagatgctgactggggggagtgaatgtacctgcatcccaatttgcctgggaggtctggttttacccattgtctgacattctgtctaatttagcatttgtcctgaatatttcatttagtgatgtattattgttattagttgcattaaaacaagccaagatggattaggtagacctccacgttgtacttccagtttcgtcatgttatggtcttgggggtgcaggaattcccaggtttccttgaggtgaaatctgaaagctgagaaatatagcacagctcacaaggaagaagtggataaaacagtgtcctcagagcagccagggaatcctaacccctgacgatcttcagtgaggcatttggtactccaacctgttgtgccttagccctgagccccagtctgtgaggtgcatatggtcctagctaataggtcagtgggaaaagggagaaataataaacgaggctgtgtgtaaacttacgtgtaggaaacaggttaagctgttctgccctgttgcatgcagagagtagtctgaatgctattgccacagtggttttatttttattgtgtgatgtaaccatatgccaatttttttctttgactattgactcactattttataatgcatccttctggcaataatgaaataaaaattagtaaacagaagtaactgtttaatgaaaatgaagtatttgtatttctatttatcaagaaagaaaagacgaacctgtggcatgcagagagtagtctgaatgctattgccacagtggttttatwtttattgtgtgatgtaaccatatgccaatttttttctttgactattgactcactattttataatgcatccttctggcaataatgaaataaaaattagtaaacagaagtaactgtttaatgaaaatgaagtatttgtatttctatttatcaagaaagaaaagacgaacctgtggccgagcacgggggctcacgcctgtaatcctagcactttcggaggccgaggagggcggatcacctgaggtcaggagttcgagaccagcctggccaacgtggtaaagccctgtctytgctaaaaatacaaaaattagccgggcgtggtggctgatgcctgtaatcccagctactcagaaggctgaggcaggagaatcacttgaacccgggaggcagaacttgcagtgagccagattgcaccattgcactccagcttggggcagaaagaagagaaactcagtytccaaaaaaaaaaaaaaaaaaaaaaagagaaaagaaagaaaagaaaagatgaacatgtaacttacacaaaacacttgttgccatttaccatggggatataatgaactaacattcagaagtcacacatatgctgaagaagcatcaggatctacttcaaaagttaaaaacattaaaaaaaaacacagaaaaaaagagtgcatcttaaaatgacttaacacacacaactgcagaaggtggagctacagaacatgcttggaagcacgactttttatttagatcagatgattgttctttgacattaagttagctcattggcaatttcatgatttcttgtgcatatcccaaaatgaaatgacacctgttaaagtgccagcaccgttagcaaaagaacatttaaaacagaaagtggtgccagttttatttcaatgtcatcagatgttccaaacagaaaatcactccagttaattcttgtaatggtttcgttttctcatccaattccgaggaagaaactaaagctttttgaaattaattctgttgaatgtattattcatactattttaaattcagttaatatttagcctacatttctagcatttgtctaatattaacacagtttttggtggagtactgcatcatgaagaaacctaacactctgaaatttaaagatacgaaatttacttggaaatagtttttatgtacatataattcatacttacatccaaataaatgttgatagtctctcaattaaaataaaagctgtaagtttcaaatttttgaaataggtacatatacaattggatcatctgaactgtgaaattttgttaggaaggtaatgttgactacaaaaaaaactcagaatatcaggattcactttttctctctgctgcctttcttcggttggattttagaaacgttcatgagtgtttaatcttctgtgcttttaaaattcttctgagtgtcttaaaatagtactgaagttttcatgacagtcttttcatttttggctgaatattgttttaaaatcatctagaaatctttcatcaaagtaccagtgaatggaacagcaaaagctaaagatttcaaagcttttatcaaaatgcgattttcgcaaacaaattatgaaaataggaaggcatggatatgtatctgcaaaggcaagggagaaactaaagaattgtagaataaagctcaaatattataaaatatgtaatttgaaaactccaattgtgttttgaaatattcagtttgtgggaataatagtttgatgaagtttcaatttttaattaaataaatttatatagagcagatataatgaaattgaagacttagtaaaactttcaaaaaaatcctaaagacagtttatttgatgatttttgacttttaaatatttgttaatgaaaagtattcttagtaaaaaaaatataaaatatttgggctgaaatatttaatataaataattgaattgaaaatattttctgtttagcacaagctctgagcttgttaagtaccttgtgcctgtgggagaagctagtctttaaaagtttaaatattggccaggtgtggttgtctcacacctgtaatcccaggcgtgattaatttgggaggctgaagcaggcagatcacttaaggacaggagttcaagaccagcctggccaacaggagaaaccccgtctctactaaaaatacaaaaattagctggtcatggtagcccacacctgtaatcctagctactagagaggctgagaatctcttgaacccaggaggcggaggttacagtgagccaagaacatgccactrcactccagcctgggcgacagagagagactctgtctccaataaatacataaaaataaaaataaaaatttaaatattattgattaaagataagaatgaattagttttgtcactaatttcatacatattaaccatatcatgccactttgaagaagattgtaggtaatttatgaaaaatgttcaaataagactgtatttttttaaatacttttcttagaaaaatactagtgatatactattaaagacagataaaactttaaaaaattgattaaagtacttgcattctacttattttaatgttcagattgattttatgaagaatttttgcgttagtgaatgaagctttgtgttattttatattttagaaataattctagcatagcatagaatattttataggtatacgaatataataaaaccagaatgttgttcaccagacgaattcttcaaaaaaaaatacaatcttcacttttagtctactttcttactctcaaaagtatcctaattagtctagtgctgaagagtttcaaactcatttaaagagaagtagacaaataagtgacaggaaggattgccgtgtgtatcttccagtctggggtgatgtttaaattcctcagagtccacttagctttgtctcttcaccagccttggtttgccccagtgctgttcatcattttaacaaaaatagatctcacaggatgttcacccagtcacctttttgtagggacaagctttatagtcctagcacttgctgattctttaaatactgtgctttggtccaggggatgttaccttaagcccattttttgtagttagtaaataagacttcttcccaaagtcacgtgcatgttcaagttcttgcattgccagtgtgtaatggataaagacaaatgtatagtaaaaaaatcatgaggcagtctttggktctcatcccagccctgttggctgtgtgatatttggcaaattattttacttctctgagcctcttttctttccattgtaaaatacagagaatgatagttaagagtatttttgtggaaatgaaccaacacaatgcagctcaagtatcttagcagagtgcctgtgttcaataaatattaataaaatgacccttaactcccctcagcaagtttaaaaacaggaagtttccatttcaccatttactttccaattctttgttaaagatggccataataagtaatgagagtgtgcatttgtaaatgtctgtcaccaatgkgaatttacttgagatgactcaaaccacattctatactggaaaaggtgcatttaacgggcaaaagaaaagcccaggccagtttctttctgtatcaaccctgggtaaatctccttaagaaaaaattaacaatcatgatttattcatagggaaagaatttaactacttgttagcattcgaatgggtcctaaggaaactcccaagttaattaaatcagaactttcttcttgagtttgatccattatagtgagttaccagctgggtatcaactgctttcccagaaaggccccattgaaattaatggactcagggctttgttgagtctggacactagagaattggacaaatgacactgtggtttattaaagaattatgactgcaaatacattatatgatgctttctccctctctctccatttaattatgaatctgcctctcaaaagccttgactctgtattttaaagttgacataaatggtaggacgaggttactttttccagtaatggagaaaggaggagaaaggttgctccgaattttgtgatcttgttcattttccgatgaagtttttttgctggtccaaatattaattaatcgattgattgaaaatgctacaaaagaggagccattcatcaaagaaccaaatccagtgattcgtgatctggggttttatcacttatatttctagagcatccttttgcttttacaacttaaatttaattgaaattttaatccctagcaggtttttaataaygggcagcttttgagacattaaaaaacattgctctcacttcccagataaggaggttgtccagatatccttatgctttagggagcatttactaagtgatggtacttcccagcgcacatttttggttttgttaaagtatcttaaaccgcccatgtgtagtcaacttccccttatggaatccattgataaatcatggcaaaaggaaaccactctatggaaataacgtctaaaggagaccctctttatcccggagaggaaaaccagagagcagtcacaatctggctaacataaaaagaaccactccttgatgcaaatcaaaagactagatgtagctaattagacatgggaaaagggtggttctcctgaaaatctggggcctcaggcattttctggaatgtgtacagtcagaacgtgcaagttagtcagcaaagagaaaacaagcagccacacctctcccaaataccgaatagtcatccttcttttgtggttcagaggtgtttgtttgtcttakaatgctgcaacttaaaaccaattgattttaaataaaaatggtaacattataaagtgtgaaagtgtggggttaggaatcatttcccaccctgtgaaaatggctctatggtcacccaggggtgtgtgtgtgtgtgtgtgtgtgtgtgtgtgtgtttgtgtgtttaacctgtgagataagaatggtcaaccagttgactcctcaagaacagtctagattgctacaggcatgaagttgctttgagagcaggttgaatgcccacacatgtaggtttggtagaggtggtggtgaaagcggtgagcatggctgcagggtactcatgccactcactcctttttgttacctctcacaacctctctctgtctccatctgacatgcctccctagactgtctctaataccattagaaacttcagcgcaaattgtgcaacctctccgacactgaccacaaaccctttccagcctcagaaatgttcatagatagatgagggttatcagggttgctcagccagtgaactccgaccacgctgggtgaggctacatttgtaatctgttctggaaaacgggaaccatgctccattttcaacctgcactcacccactcctatttctttctagggtgtctctgtttttttgcttttaaccttgggtttgactttttccagtggacatttctaactaggaaacttgatggtttccacttagattcccttattctccaacttaataaacatcaatacatttagaatccttcgctttccaagactctaactgatttgtggccacagtgatctttaaaattcattagactttcgtcattccattttctttattaaggcatccatatgagctgccatgtgtttgctctctttcatatatctgaatttactgattgttgtctccaaaacatgttctatcttagacactatctcatcctcttctctgccagatattgattattcatacattctctgatcccaaccaccagctttactcattgttatgtctttgtagctttttcttcccttaaatacaaggacaacctattatttccacaattcagcactttttactgggtcttttacctstctaaacccaacaagagcatcaaagcatgatgttgggcttggtgcctctcttccaccattctttctctttttaactccacatgtgtgctggactcttgcttatgatcttccctgtgtagctaccaccacaaaaatgtgtccccggcctttacaaatgaagtgttcagatgcaagccattctcttatagacatggcagtaaagaccaattaaaaaagggggaaaattggtgctacaatgtcactttgcgggagaatgatgtctgtaaagtgggagcctatgtcttgcaatatgctgatgccctggttgaatagaccaaactattcattccttcctctatggcctggggagatctctctccatcacacctcagtgaagacagctttgatgcatttgactgtggtgccttgggcctcccagttttcaatttttatttgtttttttctggtggctgccttcttgactgctgatgtgtagcttatgaaggagtgaaggatgtgccatcccaaaatatggcagattggtatattgagtatttcaagttgaaaacattggagacagtgtagtttcagaaaaggaagtctgacctgtctcttcctgcatgtagcacaccataaagattcctctgggaggggtacccttgccttaccagggcgagaaaatagcccttaattaccagagacttggaactggaggctacactggacctgatatatacacttaacaaagtaacgcttatgtgcctgtggttttacacccccccaccccaaatatctcctagtgactcccctagaaaatgtactgccctggccagattttctttttgctgtcatttcttctcaaatgtattatcattcattgwctaaaaaatataaaagccccttcttcagacttcactgtcttgtgaagatcttcatgtacacgtgaaattaatcaaatgtgtatacttttctcttgttaatctgcctggtgtcgatttggtttctaggtcctgctgaggagcccactaagagctaaaaggaggattgggggtgatcactggctctcctacagttatgccctattgttttttttctttaaataccttttccaacaactcgaagctcagcagtatggtggacttcctcccttgtgcatagatattgttgcatcatttctgtcttccagagaactacacttgctaagttcagaatactttatcagcttactttgtgtccttgttcccatggtggtgacaccgatcttgaagcttaaaaaatcccccaaattccgcctcccacctctgtgacactcttttgcaaaaatatgcaatttttctacacacatttctgacaaaaaggaaaaaaatgttaagtccaccctagktctgtccagacaagcacagagagaggcgtgttagatttccagacaaatattttcgcctagattttgctcaatgaacttgattcactgcagggctttttttcccacaagcgcgtggcagaggtgggctgccacaggagtggccagtgcccgctctctgcagggcactgctatgaatcaccattttcatgaatggaaagaataggaggaggggaaaaaggacaagcagcttgttgctaatgccctcaaacaaggcaaacattttgtgaataatttttagataatatatgacggtttggatctttggttttgttgttttgaatggaatgcatagaaaaaagaacttgtttcaacaaaagtttgatctgatatcctattcatgggctgattctttctcaaatatttggcagctcatccagggcacagaaaaggcacagtgttgaatcatgttgctttcaagctctgtatcagtggaaggcactggaagggattatcgatcccacaaaatacacaaggaaagtatgtgcccacttcatttctgaggaaatttagggttcagatggaccttgccatagactcagtgtctttagtagaggccaaataaataaataagccaacatagatgccaggcaacttaccatacagcatgctgaatttcttccctcatgtctggtgactggttttatagaacccattcagtgagaatgcaggagaagtctaagaattagaaggaacaaagaaaagagaatgagcacgggaataaaagtaaataataatcatgtctattcttgattctggggactggctaacttctgtcactttaaaccacttcacctcatttgaaagtccaggcttctcagcttgatgtccaaggttctccatgacacatatcytcttgagcacttcacttcatgccccgaccaagcttggacttcttccccctcacatgcttgctgtttcatgtttcatgttttagctcatgctgttccctctacctggaacatcttggttcactcaactaattctacccatcagaatttagcacaggtgtcctcctctcttcatggtcttcctaaatacctcttgggttcattattcctcttccatgttcatagatcaccctgggtattactctgtgctagcactttccttctttctgctatgtagtaccagtcaggcactcaggggaaacgactatgccattcactcattcagtcattcattcattcattcaacaaagacgtattggattactattatgttccaggcactgttttagggactgaagataaggtggtgaacaagacagataagattcctgttgtacaggagtatgcattctggcagggggatagattaaaagggaaatcaataagctaacacgttaagtgctaccgataagatgaaaatatgtcaatgggaagaagagtgcctgctgatttagactgggtggtcaggcaaagctttgccaaagagatggctgaagctgagagttcaaatgcaagaaggagtctatgaggatctgggcacggagtgtctgagttggaggaaatgcaagcacaaggccctagaggaagaatgagaactgtgagctcaaaaacctagaataagccatgtgactagtgaacagcatgtcccagcaaaagtcacacttagaaaatatagggcctgagggtcacaggaaaagttgtttattctttacctgatgggaaaccttgggacaattctaagcagggagttggaagacgtgatttatattttgcagaaatcaccaaggctctgcatgctgaatagattttttctttgcatccccagaacctagcacaatgcctgcctctgtttcagtagggcccagagccgtgctgcttttccacacaggaaaattgccttttccaaggtgcatggctgcccagtagagaggaaagctcaaagtcatatcaattcaacacgcagtactaagtctctcctcttgctccattttctactggcctgtgaccaactacttcctaaagttgaaattgcttccgatttcttttttctctatttcatggataatccatgcagtgtttgctcaacctgtttacactgagatgtgttgaggaactgtcccacggcaagaccacaaggtggggcagtaatgagtaattggaagaaaactgcggtaccttctaaagctcaaatgtggctttctagaacmcgatgaagtggagccctacattcattatttgaccttggttgttttttttttttttttttttttttgagacagaggagtctcactgtctcccagactggagtgcaatggcatgatctcggctcactgcatcctccgcctcctgggctcaagcgattctccagcctcagcctcctgagtagctgggactacaggcgcaagccaccatgcccagctaatttttttttttttttttttttttttttttaggagagacgggatttcaccatgttggccaggatggtctgaaactccggacctcaagtgatccacctgcctcggcctcccaaagtgctgggattacaggcatgagccaccatgcctagccctgtgactttttctcaagggcttcaaacagtccctctgcaagttaacctaggcatactcacagagcaagaaggcattcatgataccacaagggaggtgaggtttgtgccatttgctccatgtcactgaggcaggacagccctgtgtggctccattcccacgagagaccgtcttgctccgttaggactgcctcccacctgctaagggtgcttttcttccatggtacagtgatccttaatcatttgtttcaaaaatgtaccaacctcccgggaatgaaactaaccaaacttccctccctccctctctccttcccttccttccttccttccttccttccatccttcctgtttgccttccttccttccttttggattatgttgtttcattaaaatatatttagctgggcatagtggctcacacctgtaatcccagcactctgggaggcagaggtgggcagttcacttaaggtcaggagtttaagaccagcctggccaccatggtgaaaccctgtctctactaaaaatacaaaattagcygcgtgtggtggtggacgcctgtaatcccagctactcgggaggctgaggcaggagaattgcttgaacccaaaaaaagcagaggtttcagtgagctgagatcgtaccactgcactccagcctgggcaacagagtgagattccgtcatatatatattcacatgatttaggaaattctgtatttcagcatcacagtataaagacttaagttctaagagttgatattgctgtagatgttgggaatgraatcttaggagtaacctttaccggaggcaacttctactgcccttgctacctttggtgtgacctgaaaccccctttcttcattagtaccaagtgacttgtttgccactactcagctgtcccagaatagcttgactccacacatccatgcatttctaggaagaaattaggtgcattataaataacgagtcctctgaaaatgccgaagtgtcttaatcttttgaaaaaaattatctcaaatttacattcacaaggagccatgtcttttgccactaactgaaactcagtaacaacactgaagtatgagcttgggccttgtctgacaataaaaaggaaatgctaggtcccagggaccacttcaagatgtgcttgttcctttaaagcagggagttgtcacatccaatttttaacacatatgtatattttaacacatatgcatattttaacacacatatatatttctgattatactgtaaaactggtaaattatttttaaaamatcataaggcccccaaatcccagagaaagttgtttctattacaattttagtctatttgtctcttttaagtttctcttccctctgagcatatgtatctctaatgcatgtctgcttatgtaggcatatttatacatacaccctttcttttacaaaactgatatcaatttttgtattttaaataaaatacaaatgttttacattctttctaaacaagcagacactacttttggcacctcccaatgctggccaggtcatgttaactacccttaatcagctttttttcttgcaatatttgtaatatgcatcatctcagggcaagagacaaattagatcatttgaagattaataaatccttacctctgtttggttgcacttagccagcaaattcatcacatgcttagtctttgctttattctgggccatgtagactagctgttaagtggaaaaaaaaaaaaaattcttcttcggggcagagtggcaggatggctctttggaaagagtcttggagcaggagtcaaatggtctggctttacaccccagctatgcttacaaaagctgggtaacttgcagttcccttaccactaaagtggaaacatggatgtctaaagcttttttacagctagaaaagtctatgcttggttagcattgtgctgatgcaattctgttccagataaccgagggagggaatggcggtcctcgcgtgaagacgtaagtagacgtgctattaccctcctcggttggctccagcaataagcctaatgacctctacaaagctgttctgtaatacagaagtaaacacttactctgcacaatttctccttgcatgtgcttcccactggtagaacattattcatcttgttggtctttccaaagagattcattacttccttgctccttcttattcatccttcataatagaaatgctaaaagtctgaaagaygaggaagggagcacatttcctccctgcagtctgaggaatggctgtatctcttcatgagcaccaagaggaagcccccagatgggtccctgtccttacagccttgtttccatgtgcatttccaccccagcctcttccataatcgctccccatctctatgccccagcgatgccagttgttccatcaaacactgtcctctctgttctcagcctcggagcttctgctccctctgttaggggtgactgattctcaccaccaccaggctaattctgactgttctggtttcaccgcggatgtcacctcctccaagaagctcttctcgactttctgcctgcagaccctcatctaagctttcacaacaccctgtgttctgtgtttacacccacccaactttttcttttttaaattttattttaagttctgggatacatgtgcaggacgtgcaggtttgttacataggtaaacgtgtgccatggtgttttgctgcccctatcaacccttcacctagatattaagccccacacgcattagctgtttgtcatagtgctctccctctgcccacccccctgacaggtcctggtgtgtgttgttcccctccctgtgtccatgtgttctcattgttcagctcccacttatgagtgagaacatgctgagtttggttttctgttccttatgttagtttgctgaggatggtggcttccagcttcatccatgcaaagcactggatatcattcctttttatggctacatagtattctatggtatatatgtaccacattgtctatccagtctatcattaatgggcatttgggttggttccatgtctttgctattgtgaatagtgctgcaataaacatatgcacactcaccgaactttgcttcactgtctatcagaaaactgccagtttttcagttgcatttatctcctagaatataaaggctttgaatagatccaatggtcttgtttaccattgaatctgatacctaacatggaatctgacacctgctagacaccctcagaatgtctgtgaaatgatgtaactctacgtgatgtgtgtctactcatagctgtaaaatgagtgagccctcctgtaggtcacagtgtccagcagactggcagggacctgatatgaacatcacagaggaaaaaaacacatacgaaacaattaatgcttgccattgggccaaatgctttgtatgtgttatttcatttatatttttatttaatactaagcagacttcatgtaccctgtattttgctaggcagtggagtacatagaaaggaacagaaactgcgtatcttgtcttcccaactgaaaggagacgattaacctacttgaagatgttagaatacaaatacatgatatctgaggacagggtgaagaaaaacaaacaaataagaacatgaaaaactgtgtttgtcttgactattcaggatatgaaagtgccgcaacattcatgtatctagaaactccatgaaggaatctacacttagggcttaaagaatcctaagggaccgggcgcggtggctcacgcctgtaatcccaacacattgggaggccgaggtgggcagatcaggaagtccagagatcaagaccattctggccaacatggtgaaaccccatctctactaaaaatacaaaaattagctgggcttggtggcgcatgcctgtagtcccagctactcgggaggctgaggcaggagaatcgcttgaacctgggaggcggagggtgcagtgagccaagatcgtgccactgcactccagactggtgacagagggagactccatcaaaaaaaaaaaaaaaaaaaagaatcctaaggattcctggttcctgacaggtgcttgttccttgaagtatacttgtgccgggaagcaaatcttctctctctcgttttgaacttggaggagacagcagctcccttctccttttcatacaggttattgtttataagagcaatgtgatgaaagcttcctctgctaagactgcaactccagcgttaccttttctttacctcaccttgatcctcggtgtgaaacttcactcattactgatgcattgcaattaacagatctcctctttcaagacacattagggtatgttctgactatcagctccaaaaaaataaaataaaataaaataaaataaaacacattaggaaatttaaatgaattagtgtaatcagctgagatagtacttgaaagggaccgtgtaggcttgtggtggaataggtactttcagacagaagtctctagaatattcctgaggaagtattttctcctgcccttcaatgaatagagtggtaaggtttgtgaaaagcaggcctctggcctgagttagggaaattatatattgtttgtccaaagtagtaaactctgtctaaaatgaaactctagactagatattattttttgatgttagatgtatacgttctctccatgatttagcagactttccagggaatgatgagtctcccctctactgaatactataaacatgttatctcagtgggaaaaatagaaagagatccagagaagaagagggaacatcttgcttttgaagcatctctgcttacgagtccataggaaataaattacatttcccagggttctgatttggtttttaataacttactggccctgctaaacaagacactcaggagaaagtgcatgtgaatagatggagatctacatttttagaaaatatgtttctttcttttgggatcacaatcagaacataggcatcattgaaacaaagccgaggaagaagaattttctcatgctatgcagaagttttctgttaaagatatcagaggctttgcaccctgagagctgtaatcttctctccttgagttcttcattgagatttactgcagaggcctcagatgtgtttatttctattatccagttgctcctaatattacttgcaattgttttggcatgagggttagaaattgcaagaactcctagctcgaaatcacagaacgtacacaaagacaaaacagaaataaagcagaacaaatgcaaggataaaatagataaaaatatctccccaccctaattgtgctcttttaaaggaatgctattgaaatgacaaatgaaggagatttctacctgttgttatatagctgggcagagtgacatttttggctgtattctagtgttgagcagttgcaaagctttctttccccctgaagcagtagagggtgctatgtggatataattgaagagatgctaagtttctatatgacgccagggcttagggactgccctctcttttcaagccacttgcttttcccaaaataactaagaaaagggagaaaaaaaatgagtacagaggccatgctagaagacatagataaaatattaagtcttaagaaaggtaggaaataatcagattctaaagttctcacaaggtttggtattttgaagtatttggcagaaggcaagggtatggaaaactttaagaaattgtaagcttaggactttatcgtaagcttaagacagagatgttatctgtctgaaaacagagggaaaattttgaacagagtgattcttgtaataagagaagacttttgacaagttatgaattccttgaatttcattattttttcttgctgtttaagtagtatatattgtatatttgatgacagtcagattttactgatagagatttgaaatatattttgatagggctacctcatgctttttgtagaatcaaacattttagagctgttcagccccttggagccattaagtacaatcttaatgtttttgcataaggagacattggcaccaagaagttaagtgacttaacctgtaacaggctggtccaaacatccgagcctcaactagaaccagtgtccttacccctggtccaaagctctctgtcttttgctaccctgctttgagttacagcattttatatgctgacaatacataatcctaatacatttatatattgttttcacttacaaagcagtttatgtacatttttccacacttatgtaccaaaacgtcctttgaaaatatgttatttgttgatttactcaaagaagacttgcccagttttatgacaggctgagaagttaagtctcctgttgcaattccgtttgcaattcagtatccattacacctggtcaatcaagtttcttattaatcccacgttttccctgcctgtaaactcccttcttagtgaccgattttgctattttgtgtgagcacttgagtaaaattcaactgactcagagtagggaatcctggctggattaatgggattgtgtaacaccttcatcacttgaggcccagataggagtgactgtgcgatgtaaaaaaggcttgccaacaccactgatgtttgacgtgaaggtgaaaagttcagtggcccagagaagtgctttaaagggttcttcttaaatctaacacctgaaggaacaccttcagattatccagcagttgtgatcccctatgcagtgtctatttgtmtagacttcttccccaacacacattccctagtacatttaaatggaaagaaaggtctgggaggttatttgcaggggtgttgatggaaacaggacccatcacagctagggtcatgttatcagagtgcagattttgaattcctttctgcctttcctgcatgactttaagtaagaaaatggtcaccttaaatttgcccaataagactcagcttggaaatcattcttgggatgcagaaggatctggtccagaaagcttcagagaagccttgagaactgcctattcaagaggrgaagaaggctgagagagggaacctgcaaagatctagcaggaaaagagtcttctatgtgcaaacaacactagaccctttcccagaattggggcactaacaaaagataatgcctctgaaatattgggaaaattgttggagaatatgatctcgttccctatgctgtcactccaggtaacacccatgatgctcaaaggatttttttaaattaaaaggagtaccactttatttaacaggtagaaaattatggaaattattataccaagaaaggacataggctaataacataaattaggcttaaggagagtttcataaattatgtatctccaatggattaatgaaggaaattaggaataatttttatattatctctacttttttacttatatatttggacttgaggttttctgcatataatatgcrcactaatataaatattaatataatgctaatacaaaggaatactctctcagagattgtgcattaatgtatgtttcagtgacaaaatatagtgcgtgaccttagccccaggaggaagaataggatatgtgaaagaacctaagattttgracccaggataacctggttttaagcccaggtctgctacttaagagctgtacgactgtgagcaagttattttaaattgctggatcttgttttcctcatttacaaaatagaaacactgatatctgcatcatacatcatactattgttatgatttttaaattaaaaatatatgccaatgaacctagcaattggtgaccatattgtaggtacttcatggatatctgcctcttccttccatgtgcaaaaggaattctggcatcatcttttataattactaggaattttttactgccttcagaaaatatttctagacttatcctgctaatttttgtttagaagttagcctctgtttcagtccattctctcattgctataaagaactacctgagactgggtaatttatagagaaaagaggtttaattggctcgtggttctacaagttgtactagaagcatggctggaaaggcctcaggaagcttacaatcatggcagaaggtgaagaggaagaagagaagtctcaaatgactgaagcaagaggaagagagcaataggggaggtgctacacacttttaaacaaccagatctcaggagaactcactcactatcacaagaaaagcaaggggaaatctgcccccatggttcaatcacctcccacagggcccctcctccaacactggggattacaattcgacctgagatttgggtggggacacaaatccaaaccatacagtccctgaatatatatgtgcagaaatagactgctcacctagacttcaaaagacatgtcatcattacgcacctctgagacattgtatggtcttggttttaaatttcttgagtaatctggttaattctgatactagcgatcaacagctttggtgtaaaggtaggtcagattggtgatatattgctacagcaatttgaggaaatcaatttcctccctaaaagttttgacaatcttgtttatttatatattttatggtggtgaggggagaaattattcttgagatcttgcttctttgaaatatggttcttctcaggaatatcctatgttattagatgatctaaaacactgtggcacttcttaaataaccaatacttaagataccatgaaaattacaacccccgtgagatatagtatcaattaaactatgccatatacctcgattggttgagttccatccactagtcaatttcaaaattacctcgtaaatcactaagacaataggaaagaaagccttactataacttgccttactataacttgtcttactcccaaatttagcaatatctttttagcttattgatggtatttcaggaaaatcaaatgtagttccacattataaggatggagacatgtgttacctctttatgttcctgtatggcaaattagttgatactctttggtcttgtcgacatctctttaaccttgtaagattataaaggttagaatcatgtttaccacctgtaaaaaaaaaaaaaatctgacagcagtgggttttttttttttcttcttcttctttttctccaccacatcccctgataatgatttccatgggctggaaatactgggaggagagaaatatttagttgaattcattttaaatgaaaccaatagcttcactagtgatctcataacctcaaagcactttacaaactgagtaatcattgaagatgctaaatatagtaaatacaatgtttaaaaccttcacaaataaatccatattaaagtcttattctaccacaaagtagctttgcttttgatataccttttaaagtcatggatttcttgatggagatattgagttgggttgttcctgttgctttttgtttctttgattttttttttttctattatataagctagacctcactctcttagtcatttcattatatgtagagacaagatgctgccttaactagagctttattccaggtgcccaaaggtcttcatttagttcctagctcaattcgtgagtaaatatttcttttccagctttaaaattttttaaatgacattgtcaggcacggtggtgcatacctgtatccccagctacttgggaacctgagatgggaagatcacttgagcctggcggttccagtctgtagtgcacagtgatcatgcctgtgaatggccactgtactccagcctggacaacatagcaagaccccatctctaaaaaaaaagaaaaaaaaagaatgatagcatttcctttacttgtggagattttctgactataacatgcacactattattataaaataatagactttacaaaatataatggttgtagtttcatttgcactaaataacgataaaccttatttaagtgcaaccttattttatatatatatatatatatatacccattaatttgattgtttttaatgtagccatggacatggagagttcacaaattataatttataaatgtattaagatagaataattgcagaatagaaggatttttaaacaatttaaatagtcaccatttctgccacccattaatcctatatattggttctaggacttattcctggagttatatcctgcacattggcttcaggcatgaaggacttgatcccacatcttctccagtgggattgtggagatcgtgtcactgctggcctgtcctgcaggctcttgtggtgatcattataaaagccagccctggggtagctcaggacaggaaaggarggatattctgaaatgattttctccttttagttaacacattttggttccagaacactgagcaaatcatcaactgaagccccatgatatattttcaaagagtgaatttctcttacctgactgaggcattttattctataatagcaattctctgggttttttttttttttcatacttataacaaagcggattaatatatactcacctaaracaccaaagatactgatggctttcaccactctatctaagcaggagtaaacacctgggaactagaaatctgagaaagaggacaacacccaacaccacctaactatggccctcgatacagtcatttaacttaataaccttccgtgagagtaaggtcattatgaaatatgctcggttttacacaaagctttaaaaaaagccacataaaatagtatatgaggtcacctctgattcctatgtaaagaagattcctcctcccttccctcattcattgttctccacactctactccacacctcccctcaccctgcaatccaacttatcaaaagtttaattttccctttccaaaagcaatgtacttgaaattcctattcttagttatgtgcattttggtttcctctttgattttcctttttttccaggtttcctgttgataccaacatgaatctcaagggcttccctttgcttcttttggaaaaaaataaagaaaagagactgatttagagcctatagggtggaaaatcacagccaggaaaaggcaggcatagcatgcagcagttcagagacagggctcacccgcccatctcttccatcagccacctccctggtagggcatcccttggaacagaagccagcaatggtcctgcagggattggagaattgtgagctctaaatgataaaacgttgagtcataggttatcactgtacagagtgatcctttggcctctgccttgagggcacgtaagccattttttccttacttgttggaatttgattcatttcctctttttctcctttagctctctaatctagaattctcagtttatctataaaaggattcaatatctgggttgatcctgaggagtcaaagggttggttttgtgagcagatgggtggcagacaatagcttttgtagagatgcctctgaatgagcccacatggtggggctttgagaagcctagtgtggaatcagtaacaaagtccaccttggaataatagtaccatagtttcagtaactgctgattccaaaaatgtttcctatcacacatcttcctcatctgcctctcacaacaatcgtgtcaggagaaagctaatccaactataaagtggctacgtgatcagaaatgacaggatgggttcattgcaatgtcaagcctcagtagtttttcatcaaagccctcaaaaaaaaaaaaattccaccccaaactgattgtgtattattcaaccagacttctggtatcttcaggcacactgtttgcaaaggccaggcatctcttatgtcctgctgtctgtagacctctgtggtttatggatgggaaaactcaaacagtctgctcttagatggtccttattgcagaaagcaggcttatgccctgtaagccgggggtatctccaaatcgtgcaggaggagaggtactgattgctcatttgcttcttctgtgccttaaaatcaccatccttgttaaagaaatgcaagcattgagtagagaagtgtcttgcttgggcttgcttttgagtaccgggaattcagctttcctgctttggaaacctgagttgggatgtaggtgtgtagcaaaaggaatgggtggaggcttctaactaatggggaaggcatctctgaaacaagctgagatgtggatctgggattctgggaatcaaataattcttcccagcaccaaactttgatgagagaatactttaatgtctgtggttgcagaataaatatgattcactctgaggattctgcactgcaattgaatatgtcagaaaaggcaaataaaaaattggaaaatttatctgtaaatagttctcaatagttttagaagagcttccaaggacattaatttcttcctagccattatttattaaaaccttcaggatagcatctcattttttggccacactaatgtagcaactaagtgtgcaggccctggattcagagctaaatctgactctttcaagctgtaagcccttgagaaatctacataaatctctctgtgcctcattaatgtcaactgtaaagtgaggaataatgatattatgtattttgtaaggttgtccgaatgtttaaattagattataatacttaatattaattgaccactttggaagtgagcattgttctaaatgctttaagtatgaattttattgtcatcgccatccatatcaattatccttatttattatgctgttataagaagctttgatttcacaaagaaagaaattcaacacttaaggaggaggcatgagaaaacatcttattgaggtttttaatcatcttctagtgaaccaagcaagactgaacctttattgcaatgttttactaggctttatagcacttttaaagggtcaggtaaataaagtcataattcaaaacagctgttacggggtggggcacaatggcattgatatcaagagactctagtactgaatcagttacttcctatttatataattaaaaaatttttttgttgttgtttgtttgttttgagacagagacagctctgtcccccaggctgaagtgcagtggcacaaacgtggctcactgcagcctcaaactctcaggctcaggcctttcccacctcagccttctgagcagctgggactataggcatgtgctgctatgcctggttaattttttatattttgtagagatagggtttcaccatgttgaccaggctggtctgaaactcctgggcataagtgattctcctgcctcggcttcccaaagtgctgggaatataggcatgtgcccacacctggcctatttgtataattttgaataaatcatttaatcttgctgagcctcaaaaagcaagctttaaataaagaataaattaaaaattaaaaggttgaattaggtgatatcaaaggttcctttcacatctatgattctaaatattactcagtatttactctgtgcagaatgtctatttccacaggctattgcttacagcacaacacagtgatcatattcctctttcgtaactagggagctgagcaccacgatgctggctactggcagagtttatccctcagcccatattaagtctagaaatgattttgtccaactgatgttttctcttcacatcagatgtcacttttttttttttttttgatatggagtctctgtctgtcacctaggctgggtgcaatggcgtgatctaggctcactgcaacctccacctcctgggttcaagcgattctcctgcctcagcctcctgagtagctgcgattacaggcgcacgccaccatgcccagctaatttttgtatttttagtagagacagggtttcaccatgttggtcaggctggtcttgaactcctggccttgtgatctgccgaccttggtctcccaaagtgctgagattacaggtgtgagccactgtgcccaggcttttttttttttttttttttttgagacaaggtctcactctgtcacccaggctggagtgtagtggtgcaatcaaagctcactgcatcttcaacttcctgggctcaagccattctcccatctcagtctcccaagtatctgggactatatccagttatttaattttaaattcaccacactcagctaatttttgtattttttgtagagacatggtctcactatgttgcccaggctggtcttgaacttctagcctcaagcaatcaatctatctgccttggcctcccaaagttctgggactacaggcatgagccaccacgcgcagccagccatcacatttttagataaaacatcgaggaagtacttatactgatatatacattttactatagcaactatagtaaagagaaaccagtgagtcctaaaactgaatttttaaaaaaattagaaacatagagttaaaattaagattatactcaaagttcttcagagataagtattaaagtcatatttccaaacctttaggcactataaagaattccataaataagaggttatttaaaattaaaaaaacctatgctcaagcaatatctttgatcataagacaattctggcaatgagacaaattcttgaaatctcaacaacactaacatgggctcagatttttgctttcaataaatagaacctcatcaaagaggtcttggaaattctgctagtcaatggaataaaataatgaatcggatagaagtcctccagccctgtgctggaccgaaatgtctctgactgcctgtcatatttcagaggatcgtgctcctcagagcagtgtggggctggcacagagatgaaagaaagaagaggttcctccctggtttctgtttatttgaacctgaatcagaatagagaggaagcaaaggagaatgaatggtgtgatccaacttttcttccatatgtgaacaatattgacttatatggcataattatgcccagatgctgtcgtgacagggtgtagagatttctgacttgcataactgaatatattttttaaagacaacaaagaaaaagaaatcagtcacaacattgctttagcatcttgagtcttggagtgcttctgccatggaaagttatagtctctgctcttttctgcttagactgtatcttaaaactagcttcaatattggatggcctattttaagggagatcctgacacttagtatccaaattacaaaagatgactaggttactgaggatctgaagattgtcccatataagttatagttgaatcttctgtggaagtttaacttggataaaataagcagagaaatgacaaatgtgttcacatatgtgaagatcatccttgtttttcttgttttgttttgttgttttatattctaggaagcacagtggaatttgaaagacagactttagatcaccatattggagacctttataacaattaaaacataggaatggggcaggaagccttattaggtggtgagattgtgagattcctctgctgttgatggagactagacagaggccagatgaatgtgtcaataatgttgcaagcactgcttccatattggctagaaatttggaaggttagaaaaagtcaccaactctatcatcataagaaaactgagttgagggcagaaagtaatatgatatctgggttttggggaaaccagttacctctcttcaaatctttaatgtggaaagaatgaaaccatcttagacctttttgagtacagaatgacttgaagtcagaggaaggagcatggcagacacagaatgtcccaaattgagacagcatcttttaagcaaattgttgtccctttgggtagagtgggaataataatatcgcactcacatttatctcacagatgctgtgagggtgtgtgactcagtgtttttaaagagctttggatacctgctgtggttaatgtgtcactcactgcgaagctttccaaggcaattattttgatcagaatgtcactcagagttagtaggctggcttcatgaatcatttggggagggtagtataattcaaatttgttatgtattgtcaaacatttaaaaagaataatagtataaaacaaaatacttgyttttacactaaaatttaacatcttttttttttttttctgggaaaatagaatgttgcctaaactgaagtccaaacaactttactttttaccttttcaaatatccatgtggcatcaagccaggccatttaaaatgacatccagttatttaattttaaattcattttgtagaaatcccacctctctggggagtatgtacagcaaaagtaaggccatcacaaaagctgaatgtcccaaagtggtgctttttagcagaaaatgtaatttttttaagatgaaacttgccttcagtgttcttagagagtgggttccatattggtttctgaaggagagtcaagcctggtctccacagtgcactaaatgcagtagggggtcaagcaaatgatgggaaaagcataaatcatcttggaattatagattcctctttgctgtttgactttaaattcaccatctgctggctgaatcttgatgggagttgaacataaacataaggccagtgcatgactgtgacgtggaaggtggaagaaagttccttctgacttgttaaaacccttaaaatctacacattattattattataatttagacaatgtctcactctgtcacccagactggagtgcaggggcacgacctcagatcactgcagcctcaacctctccagctcaagcgatcctcccacctcagtttcaagtagctggcactatgggcatgcatcaccatgcctggctaattgtttctatttttttgtagaggtgggttttccctatgttgcccaggctggtcttgacttcgtgggctcaagagatcctcccacttcagcctcccaaagtgctgggattacaggtgtgagccactgcgcccagctgacatctacagattatcatctattattcttgtatttgttaaccatgatctcaaaatgatttaattataaaactcaaaccttaaaggacaattggattccaaaatgtagattatatgtagataatatttctgttcacaagtctaggtgtacattagtatccattcagaaaagtgaaaaaaagtttaaaagcatttttaaaaacatgatgaaactataacactcaaaataatgtgatgggggataaaaggcagttgattgataaatgagtcattgacaggtcaatgctgtaaaaggccgagtctaagttgatggctctcagtcctggttcgtcactgctgttgtggaacttggcaacgagtccctcttgggaattataggcttagcatcatgctcttgctcgtattagctgcttcttctatcactctttcaacagtaacatattaaaaacaaaaacaggaaaaaaaaccctcaaaacttctcaggtaagtagtattaaggacacaaaaatatttcaggcttgatttagaactacatttatgaaagtaaactacgtgatatagagcaaaaccacaacctttaggttttggggggttttggtcttatttctctttttaaaaataagagatagggggtctcattctgtcatccaggttggaatgcaatagcttgatcacagctcattgcagcctggaacccctgaccacaaagggatcctcccacctcagtctcctgaagctagaactacaggcatgtgcctccacacctagctaattaaaaaaaaaaaaaaaaaaaaaaaaaaaaaaaaaagtgtgtagggaaggggtcttgctgtgttgctaatgttgaactcctggccctaagtgatcctcctgccttacctgggattacaggcatgcaccttgtgtctcactaatagatttgctttctaggtctttcctgtcaggtccaccaatattttagatggatggagcacttgcattagatcaggagtcaaaattctattcctgaatctattacttaccagttgtactactttgaatgaatggcttaattttttagtgactttgaattgttccagatataaaatgacaggataggtctagagagttgccttagatgaattaggaaacagtttctgagatagagatgttagtgcagtaggtttattggggagtgttctcaggaatgcctgtggggaagtgaaggatgtggaggaggaagatggactggaattcatttgccagagtcctcagcagatcctaccagctctagagctgggatggcccttcagagttatcctgatccacaaggggtcagcccctaggcattcataagtcactttgtccagtcattggggttgaccccaggaaaaggtatggtttggggtaagaggactcttcagttgagggtagttcctaggaagctagtgagctatgagttggcatcaggcaacatttccagcaatttggtcaatgagttccccttaaggctggatctgggccacggaccatggcactcactgccatattcacagcgtcgttttcagtgtgaaattctactgtgttaaagtattgtacagtcactgaaatgagagtatttttatatttggctacccatgacatttattctcttctgattatattgtttctctcctgatctagagttttagattgttttgtttgttttgttttgttttcctgtacttttctgtctgttgaggaaaaagagttttattcttctagtatgagagtttctattagtcctcctttttagacagatgaacaccctgtgacaattccttttgcctttttgtggcgtgtaaaaaaaaagaaatccataaatagagtcgttacgcaagtcttcatgagttaatttctctctccagttttcttactactttttccagttttcattttcttcaacagaaagcttcttcttctggctggacacagcggctcacgcctgtaatcccagcactttggaaggctgagggggatgtaatcccagcactttggaaggctgaactcctgagttcaggagttccagaccagcctgggcaacatggcgaaactcccaactctacaaaaaatacaaaaaaaaaaaaaaaaaaatagctgggtgtggtgatatgcccctgttgtcctagctaaaggggaggctaagctgggaggattgctagaggctgggatgttgaggctgcagtgagttgtgatcataccactgcactccagcctgggtgacagagggagatcttgtctcttaaaaaaacaaaagtttcttcaaattgcccctttacaatttaatatgcatgaacacatttctttacaaagagaaggttatcttttatctatattcaaaatcatatgccctggggatctttacatcacaatgcaaataaatgttgagttaaccaaaggaagtgtgagtaacaagttagtgactgggttagggggtggttaggacagtggcgtgtgattaagagatgaacatctcagaccgatgcttagtaaaacctacagggggaagcatgatgacctagccttgaatatctcatttaggaagttacacacgtgtctgggcttttcaaaatgtttgcatgccattaatcagcatcttacatcagcttgctcaatgaatgatgactatgtcaaatggaagtaaaacatataaggccagagaaggatgaagggaagttttttttaatgcagtaaaggataaagaaggatggaagtggccaggagtggtggctcatacatgtaaccccaacactttgggaggctgaagtgggaagatcacttgaacccaggagtttgagaccagcctgggcagcatagcaagaccccatctctgttttttaaaaataaaaaaatataaaaaaaagaaggttgtaagttattcaaacccataaggagttcagccaatgtattgaggtttcacactttagatatgatcaatttgctgtctttggccttaaaggaaaaacacaaacacagcagcctcgtgttcttctcagacattggtttctcctcctttcttcctaagacagctcttttcccactttctctctggccaagtccatgctcagcattgcgtgacttcactgttagtctaggtttattctgctctgggaagtttccctgacccccttcttgacagctgcagatcctgtcagtcacttctctgtgtgcttcccttgccttccttgtagatttttattacatcaattaggatacaccattacaatgcattattttgtataataaacacctgtatagtttctaccatatgccgggcactaatctaagtgatttacaaatgattattcttctgaccctcatcacaattctatgagagcagtctattattttcaccaatttatagaaaaggaaactgaagcatagagaattgaatacattttctttgatgtcatagcaagtaagaaaaaaggctaggattctaatccagggagtctggctccacaacaggtgcaattaaccaccagaccgtgaggcctctctgtcatatgcaagctcgtctgttttgctcagaagactgtgttttactcactcactcccaacttcttatggtaaaaattgctttttaatgatttaaataatacatgcccatgtaaaagttaaatcaatgactaaagcattctgaagaaaggaaaggttacctggaatcccatgaccctgaaataaccatcattaaaattttgttctttatccttccatgcattgtttaatgtaccacctacccacacccatacacagtaattaaatgggacaatataaccatttttttaaagaaggatggacatcatctgctctcatcctaccagagttgtctatcccaaaaagacaggttaaaaatctatgtgttttttctataccttttattctctcataggcttgtatctctcatttacgttaatggaactcattggtgtttcaaaaacatgatcatcttaaatgtactcttttagatgttgctttgctcactcagcagtcaccccatgtcacctggcaaagccctaatttatttttttcactggccacgtgacattcattccacagtgtagatgtatcacaatgcattcaggtattctcctatggtattaacttggcttctagaatgcaggggctgtctttaaccctggtgtttgtgacattgtgatgggcataatgggatcccttgaataaatatttgtaaaacatggatggaagtcagattttagaaagaataaattagttttttcttaattatgcatggatatggtcttgaatcggttctcaataaatcaaatttcagtaagggactcacttaaatgtatgagaagagacccctgtaatcaatgtttttaaagttaaatgattgtcttttacattttaactggtgtaaaataactaattattgttccaaatagaatttttgcttaaagatacgtacaatggaacgttataaaaccacctatatttacagataccttgtgctttgtgatctggcttgtatttttcctgttcctttcctgttaccctgtgtacgaaatgtatgttcttcccataaaaaaactaaactacttccagttgtgtaaacacaacagattctttcagaccactatgccttggtgtatgtcaaccctcagctaggaataacatttccatctctgtgattccattggcaatttctgctcaccttttcctaggttgaagtgccacttcttctgcaaaacttttcttgaatctcctttcctgttaccctcctgcacaattaaaaacttgcatccatttgatcccatagaatttatgctgtacttacatgacaggtacttacatcttttattttaactcatttatatcacttacaagactgtttttttctttaggacttggaatatgaccttttcatctttttcactgcagtctttttagtgtccagcatggagaaagtgctcaaaaatatttgttgagtgaatgacagtagagaaaataaaaatgtcctggattggaatcatgaaaactgtctacttatctctaatattaaaaagctcagtgtaatcttagaaaaaataatctgagagctctgacactttccagaggccacttccacgggaaaggaggagcaaagtctctgatcagaagttgrgtaaatatcctctgaggtccctgattatccagacattgacaaaagaaaggctctccaaggtttgccattattactataaggaagtcccagctcagatgattcatagttaaatatttgcatctcctctggctaagaaaaataaaagccacgacattccagagcctttaggcatgtaagatcttggtactttcccagttattgctccttagaaaccggtaactgaaaaggccctgtttcagaaaagcaagatatgtcaaatgggaaggaagtagaatagctatctggttggaattcagaaagtatatcaaggccaacaatataattgttgaaattggttattaatgttttgatactgtgacatatctgttttctgttctctaccacaaacaagaaagatgttgaaatatggcaaatgttatgaataacaaagaggaaaatacaaataagttcttttggcaaatctccgtagcaggttgaactcagactcctttaatgtcaataaacaaggctcagagtcaatgccactttctttggtggtcactttaagtgtatttctcttacaacagccctgcacgtccagtgttattattactgcttcacagataagaaagtggaggctcagaaaaataatgatccataattgatatagtggtatatatataatttatatattataccataggatttaaactgaagtggtaaagcaggtggtaatttgcagagaatgattttggaaatgctccgtagatacctctggctctaggcatataaaactattttcttattaactgaaaatttacaattacaacttgattcttgtggtttaagacaatggaggctttctacatggtgcatgcaaattttcccaaaatctttcccaaattcatttataattcagtgtgggtgagcttaccagttcctttccagaaaacaattgtgattaaggagttcacacagacaattattctgttattctcctctgtcctcaggtaggcagtgctcctcgagctttgggtggcaatccttcaccaatccattgtcagtgtgggtccagcttttcctccttaggccacaaagatagagttgctcatattttatttccaaaatatagtgttaggggcctgaaggccacaaagaagactattctgaaagctcccacactgacatcctccccagtactggaaaacaagtaataaaagagtaggaaaaaagacctcagggccttgcacataataggccttccataagtttatttcataaatgagattctgcttgacggactggcagatggagcctgagtttatagtcctgtctgttattaccttgctttgggccctgtcataacacttcctctcaaacacgtttgaaagaaatgcagcccaacataggccgtctcctcgctgtgctgagagggtcttgggtctcacaaagcaacacacacagccaggtcatgtctctgagcatcggatctagaaaactacaaagccaggaagacatggacaatgctaacatcctccctttgtccaccacatacatgcatgaaaacacacctaccctcactctccacccacccacacacacacacactggaaattgtatcatacacacaccggaaattgtacccaaaggacgctattactaactatgaagcaagtggcacccatggcttgtccagagaagacacccacagggtcagacttcacacaacaagcctatgaatgggatagcccacatttaggagtggwcttctaatccagaatcttctctttatttagttcaagataacataaacttcctttttgtaaatttgtccatcatccactcccttgctcttatactctagtgagggggaggtcagatgataaatgacaaggaagatcatttccagccgtgatgagtgagatgcggaaaacagggcagccatggagcagcgagagaacaaccaggtgtggtcaggggattccctagtgaggtcgtttccaaaaccctcatgggtagacctgaggctgtgaggaaaagaggaatccaggcagagagaatcaaaaatgaaaagtcctcatggcaggaatgagcctatttcaaaaaaaattaaaaaacaaaaaaatctgggtggcttaatgaaaaagaacaaagagacccaagaggctagtcagtttcgactggtgcttagaggccatggtagagtggacatttttttgtttgtttgtttttgagacaaagtcttgctctgtcacccaggctgaagtgcagtggcacaatctgggctcactgcaacctccgcctcccaggttccagcgattctcctgctgcagcctcctgagtagttgcaattacaagtgcccgcagctaaacccagctagtttttgtattttcagtagagatggggtttcaccatgttggccaggctggtctcaaactcctgtgctcaggtgatccacccgcctcagcctcccaaagtgctgggattacaggcatgagccactgtgcccggcctagagtggacattttattctacatacaatgggaagccatttgagggatttcagcaaggagattacatgatctcaatggacttcttatttttctttaattttatactttaaaaatttttgaaacaggggctcaccctgtctcccaggttggagtacagtggtataatcatagcccactataatctcaaactcctgtgctcaaagctatcctcctgtctcagcctcccaagtagctgtgactacaggagtacacaccatgcccagctaatgttttaatttttttgtagagatggggtcttgctatgttgcccaagctggtcttgaactcctgagctcaaacagtcctcctgcctcagcttctcaaagtgctgggattacatacatgaatgcacctggcctgaaagtactttttaaagaatactaaggctattgaatgaccaggtggggtagcagagaggaacactgtgagtctgtggcagtgtctggataagggattatgtaagtaccactaagatggctatgttgaagagtgagggagcatttagtttgtctgttttataagtagaggccatcagacttcagaggaattcagacttaaaattcatgtgcctttgaatggggaccacatacatgtcacatcacactaacactaatgtttcattgattcattctatcccttcccaggaatcaaattctgattaagagaaagaccctaagtggctgaaggaacaaaaagagttattgcaaaaaaaaaaaaaaaaaaaaaaaagctgatgcagttaggaaagggaagcctgagctattaagaaaaacacattgcttcttacatagtagtgctaaaggccaagcctgcatatccctgcaatctataaagtctgttttctctgacagtgtcagagttggaaagatcaataggtgtcactcacaccattcatcatctcagaaatgagaagatttaggaaaggagattgaaatgacttatgtggggtcacagaactagttattgttgagaccaaatttagagtcttgtctcctggatctcagtattatactttaattatttcttttttaacatgtaacccaatttgctcctaatagacttggaatacacagtgcctgaaatgtaaagatgacttactcttggccttaaggcatcaaatctgccacacgaaattttaagataagcataatacatcattggaattactcctgcttcttgtacctctttcacatgagttaccatgaagtgaactctatcttttatggaggagaggatatggaggagcataggagaaaggtaccatgtgaaagaataaataacgtctttgccttggactaagttgcattgcagttatcaccggaagttgacagctttggataataagcatggatcttttttgtctttgttggagcctgttgcccttcacctttatgtaacatctaaattctttattctggttgacatgggttgctttacaattttaacttggcatgtgtcatacgatcataggtataatattctacagttacaaaatatgtttgataagtatgaggcattcatgctcattgtgaaagccttcaaaatgtctgtacgctaggagaatggtgaaaaacaagcagtcaagtgagtctcagtgggttgttttctcagaccacgtggactctcttctcaaatctggtactggttttacgtgactttggagaatcttcattctgaatgagccccaaacttttcagtaaaataaaaaaaggattgatattttatgaaacatttttataccctaaaatgcagaagcatgttagaaatatatagttgctatcagtcttcaattaaatgtttaccacttggcaaaaatgatactttggtaaatccaaacatgcctaggtatccactctgtatactccggagaatgttcctatttaagcttattattgtcttgagcattaagcatctcacatcagttgttacatctggctttaagtctccaatgagccctggggaactcaatcccatcaaaggaatttcgagaggagttcacagctcctatctaccatagaagggagaaacaggataaggaatagatccctgataaagcacatgaacaaattaaatccattgttaatttgagtgactggcatagagaggtggcccctacaaaattstcactttttagagtcacggtggttcacagaagaatagaaatcatcttttcctcttaacattatttccatgtactacagttccctctccctaaagtggtctacttgcatttgtcaacactgaaagcaaaaacaaagttgaatatacacccatggtgcatattgttaataaagaagatggaggcaattcagtggtattctaattgtaatgataaaaacttacctatttcatcagttcctctcctttgcccctaaaccccaaatactcactttgtctcttagatatcttgaagtagagttaataactaacgagaataagcatctccatccatgaaatattttaaatatagtagtgtggacctaaaaagatagtgaaattggataggccatgaatagaacaagtcctcatgtcataggcaaacatccagaaagttgtgtgttttgcatttgtgttttgttgtttacatctgttgcataggaatgatcatagttacaacagctgacatttaatgaggacttttcatatgttagacactgtgctaagagctttatttacatgctttatctaatttaatctgtacaaccaatttattaaatgggcattttccagacaaataaaatgacgtttagtaatttcattttgattgcctgtagtcacagccaataagtattagagggaatattgcaacccagtcaactttctccagagtttatctttctgtattcctcagctggttgttggaggttgattgaaaaaccctttgtaagccttgaaatgctaaatagtctacataggaaaggcttctactattgtttctacttttttttaatggtttgtaatctcagcagggattgtgttatctaaaaatctgcttgatgaggtctgagatactggcttttagaggtcagacaggaatgactgcaagataacttgactttctccttcccctctgctgctaaggggtaaggtgggagtggttctaggacttctgccatagaactagatatgtgatggataggaaatgaaaaaatgtgccactactgcacaatgtcaagagattaattggcatttaatgaaatatctgtgccatattattttatagtgtgcaacatttaaaacaatacacatgtaaaaaataaaaaataaaacaatatgcatgtatgcatacatacacacacacacttttagctctgtcttgagctgtcatctcctggggcaggcttaatgacaggtgcaattctggcctaattcaacctcttgaaattgaaaagggttagcaccactcagtggctgctaaatcctagagggcaaaacagcctcctrtgtctcatcccttcatgactgtctcatgggagctcgatttctgtctctttccacctgctaaccagattcgattttgatgctgtaccattggtagtaaaatatacttctttctggtaaaaggagacctgagaaagtagaaatggcattatttaaaggaatttatacataccatataagttggctggatggaccagccaacaagctcaacactttgtattcattgtttcttttaatactcatttcaagctcctggattcagtatcattatctccatatcacaaagaatgagggactctgaaaaactcaagaactttcaaggtcactcacagaatacatgcctgagctgggattctaactcaaccccttaagcccgatatcctgtactttttctgctatatcaggggtcagcaaatgatagccaatgggccaaatcttacatgctgcctggttttgtgaatgtttcatggaacacagccatgcccatttttttatgcactgcctgttgctgcttttgctttacaacagtcaagatgagtgcttgaaacagaggccacatggcctgcaaagctacaacattgagtggccctgtatgagaaacacttgctgaacccaataacaatacgtgagagatgtattgttattgacaataacgaaacatgagagatgtagctcaaatcatttaactcagtgtgtctacatctttttcctgtatcttcaaaatccaacaggataggtctatagatatactgtcttaagcccagcttcttgtatacatttattttgttccaagataacgtgcagaaacccgaattccagataggtctcttataatgagtcatgtttaagagggttctattattccactttgcatttctagaacatacttctttcagaataattactttctaaacctgttcacttagcaggcagatggaaatccaacatcctttggcagagaagagagaggaattttccactcgggcaaagtgaagcactggtcagctcgtggctgaaattttttatgtcatcccctggttctacagaagactgtaaggacagaggaatgaggcatttcgccttgggatcttcagactcagatttctgagtcaggtttgaggttcctgctgtcctgtgggcagtgaggcccagggattacaccaaaggagcaggaacccaatgtcacaggtcccctaactcctgcctagttgcccaggycacataggmacaggcaggggagctggctgatctcatttgtttgttttccgtgtccgttctcaggcagtgataggcatgctatcatctcaattcttaaataaaaccaagttgtatcgttgaagagcagataaagcaaagacagaagcattttaaaaggaattttgtggcttccaaagtacaagtatagagtatttctgagttaatgaagaaataattacaaaatatttttgaaaaagtgacattttattcatagtaattcatgtaattccaactgaagtaattgatactttgtaatagtaaggacctattcgagtgaatgtttaagatactaattatatatcaattttaaattatttaatatcaaaaaggcttgaaagcagcatattttgtgtcattatgtgaattcttgctttgccatttttaaaactatttgttttctcataccccctcctctttattttttatgatgtcaaagactgtgtcagtcaagtctgtctctatgtcatttgagtttatgtttatgtgttagtgcatttttacaagttaactatccagaaacatgcacactctgggcagaataaaaaatgtctaagttaagtgaaaaccactttaaagcatggcagccaaaatagctgtagaaaagtttatgctctattatgtacaattttaatagacatgatatcttgtttcccagaatacaacagattgactatcagtcattttgtaaaaaatgaaagcaaaactaacaatcacaagagctaagatttgctggccctttgcactgtcccaggcactagtctaagtcttttgcaagtgtttcatttttacagcaacacaatacatttcctactgttgttatccatcttaaggaggaaactttgtacagaaggtttaagtagctaatcaagttttcacagctgataagggatagagccagagtccaaaagcagtctagattcttaatgccaatgctgtattgtctctccagaaaagaccactctcacctttccccttgttcttgataatacagttaaattattcatattcatagcataaattttctgtatcatatttaagaatacagttaaatattggtgcatattagaaagatttcacttaaatatgactacatgaaagtagatttgtcttttctaaaaaataaacaagcatttgttttctaaaaaatttactggcgtgcaccatttcatttcctaataattcagaataaatgaggtgtcaccgtggtccacttcaacagtagatgggcttatattcaggcaggaagcatgtcacctatacaacacagatgtgggtgattaatgaaaactaaatcatggggatgagatctttaagaagaagaaaaccaagttgtcttccagaagtgttttcagaaccccctgttttgaggttgtggatagacatgacggttttacaatgccaaaacagtctgttctaaagagaaaaagttcaatcaaccatttcacctgcattatgccgaagagctagtctttacagtcatggggctttaaaactattttgatagcctgtttgggctgcctctaaatatatcctccaaataaaaacctcagaaaatgtatcagagaaatgtacataattaatatttggcttaatatattgtcaactttgattttacatgtcccatccaacttgttaagccttctttgtggccattagtgtttactagagaataatatcatatttaattttctaattatgtgcgaaccttggagtcaggattagttgatatttttacaccttcaaatttataaacctagtatgaagtcccatctagactaacaaatgttttataatagaaatttaaatagtactccagttttgtttatgcatttgctgatggtctttcttgctatgaactttagaaactttaaatgtccrtttactcacaatacacacacagcctcaatgacctaataagcagatttgcagagccataaccttgctggcttatgtcagctcgaagtaaarggggaggtggtagtggtgaatctgtttttattactcagtgtttaatcataatgaatcagaggcttttatgagaaaccttctacatcccatgaaagatttgctgatcaaagatgtagagatttctgttttattagaaaaaattgtttagcacctcattgtggatacagaagacattgtttgttgaaaagtttaagtctttttacgctacattggatgtcacactgttctgagtttagtggtatcaggtcatcagattctgtaagatgtgattctaaaaattcagtcctagtcctaccgagtccattagagaaggtctgcagtatataaaactgtgacttaaaaaatgctcaatcttccatgcacataactgcctgatgactctcaagctcaggtgtgaccttcatagacaggctgttgtaaagtctagtaattccttcaacacaaggtaacttagtatttaaaccttgaccacacatcacttcagaattactaaaggaacttaaatatatgtcagagctcctcttcggaatataggacaatggagcttatgcagatagcattactttaattttaattgtacccatctgggttcttcgaaatggcaagtatttcgtttatgtgcctttctcatcttgggtcaactcagttccatgcactttaaaattattttaggaaagagccacatcttttttttttccttctttctctttctttctttctttctttctttctttctttctttctttctttctttctttctttctttttctttctttctttctctttcttttttgtgcatgcatgcgtgcatgcatgtgtgtgtgtgtgtgtgtgtgtgtgtgtgtgtgtgtgtgtgtctcactctgctcgcccaggctggagtgcactggtacaatcttggctcactgcagccccgacttcacaagctcaggtgatcttcccacctcaccttagcctcccaagtagctggaattacaggcacatgtcactacactcagctattttttttttttttttttttttttgtatttttagtagagatgggattttgccacattgcccaggctggtcttgaactcctgggctgaagtgatcctcctgcttcaaaagtgctaggattacaggtgtgagccaccatatttggccaagaaccacatcccagtgctgtagaaaactccaaaaatttattttgcaattcaaaatataaaagtttgttagtagacatttagtttgttagatatttaaatctactagacaatctattatgtattctgctcagaaatggttaagacctactgatctagaagacggatctctctgagccataatttctgctcaaggcttgctaggggagatccttctaacttggctttatacacaagaagctagctcacaaaaatgtcggtattctagtagctatgcstttcattgaccagacctgagatttggcctctccatcacttcctctgcaggtgatgtagacatcatttctgctgacatctatgttgatgcagttctagagtcatctgtgtccctattatcctgaaaatgaaaattgatagcaaaggcagataatgtccatttagttctgggtgtaaatgtcttccttgctcttccattgtgcaagcactttatgatttgagggagtaatcaggttatattccttctgttggccagaagtgcctgttgaagaaagacttggctctgttggtctggaagctaactatgtagactgatccacagaggactccatattcatcttcttgatactgagggcttcatctgtgagttgtaagcctgtaaatcctctgtttcagtggtttcaaagttccaagagcaggaggaaaatccagactgcctctgctgctgtgcagagcaattagacagtttgagtgcctcaactgttcctatacaggccagtggagtcagagccttaaaaagaccctcttctcccagtgctttctcaagtaagtacagcaacctcaatgtcttatagtatcactacagcacaatacatgagtagttttacatttgaagtaggattaaattaaaagtaatacattcacatggtaaactcaaaagtatatggccaggtgcagtggctcatacctgtaatcccagcacttagcgagactgaggcgggtggatcatttgaggtcaggagttcgagaccagcctgactaacatagtgacaaaccctgtctctactaaaaaccctgcagagacggccaaccccatctctactaaaactacaaaaattagctgggcatggtggcacgtgcctgtaatcccaggtagttgagaggctgaggcaggagaatcacttcagcctgggaggcagaagttgcagtgagccaagatggcaccactgtactccagtctgggtgacagagtgaaatcctgtctcaaaaataataacaataaatgtatatatagatataaattatatattaattctatattttatatataatatatactataatttatatacttataaattatataatatacaaatatatatttatataaattatatacctataaattatatatataattatatataggtgaatatatacagatgaatagttatatatgtagatgaatagatatatagatggataattatatatagatgaaaatatattcacatgttatatgaatatataagtatatatttatatataaattgtagatacataaattatgtgtaaaattcacatgaaaaactctctccacctcattttaccctttattccttctctttaaatctgttgaccaaaacaaatcactgttaacatttgttatttaggggtccagaaatgttttgtgtataaccataagcatgcatatatatacatatcaacagctacatctagatggtccacttactacagccccagaatggaaatttcttcctcaaagcaaacattagaggcatcttctgggaaaaaaaaaaaaatctatatttatctcattctgttcttcatttaattagcataatccctgttggatattttcctcaccaaataaggaacctgtaattaagtgttatattacatgtgcttatttctcttcctggaagtccattttttaaaaatatttttaattgatatagcatagttggtacatatctttggggtacatgtgatattttgatacatgtatacaacatgtaatggtcaaatcaaggtgactgggatatgcatcacctcaagcatttatcttatctttttttttttttgagatggagtcttgctctgttgcccaggctggagtgcagtggcgtgatctcagctcactgcaagctccaccttccaggttcatgccattctcctgcctcagcctcccaagcagctgggactacaggctcctgccaccacgcctggctacttttttatatttttagtagagatggggtttcaccatgttagcccagatggtctcgatctcctgacctcgtgatccgcccgcctcagccttctaaagtgctgggattacgggcatgagccaccgtgccyggccaagcatttatcttttctttgtgtcagcaacattataattcttttcttctagctaattagaaatatgtaataagttattgttaactataatttccccactataatatcaaatactgtaagttattccttatatctaactctatttttgtacccattaaccaactgttatttacccctgctcytctccttcccagcatctgataaccatgatttcacgctctatggagatccttgctttgatgataaattcattaaggacaagaaccctgcagggtgttcaatatgcttcccaggtgccaaatagtctcaatacatattaacagaaagtcagtgtcaactcacctgcacctcacacagtaaattgatttaggcatctcagattcctaaactctctaggttaacacctcatatagtaatgaaagtataatcagttcacatgattgaaatcctctctagtttaatgtacttgttgcttttccatggactttgaaaacatgaaggtctgtagccgtgttgttgcttttccatggacttggaaaacatgaagttgtgtagccgtgtgtctccagacttttaacagcccagaaatggtttcaatgttctgcattaaataaatcgagaagggttagacaaaacagtgtctgaaagatttcatgctgtgagggtgatgagggtgatgggtgacattaatgaatctgaaatggtcrtgactacaaacttgtttttaaaatgtcactttctctaagagaacaaaaacttgaaactcaatgttcatgaatacaagaaggccttttcaaagaaaggccacgggcactctcactaatacacacttggcatttgggtatatccctaagctgtggactgtgtttacatatattactctttcttctcatcactctttaaccaaattgttgagtgtccaagatgccacatggtcaatggattattaccctgtggattcaaatctgttaccaattactctaggggtttattgagtggtcctgcacacccactttcctttgtttttctaattatcgctgcacagctaatcctagctcaaaaaatcaattcctctctcatatctacttacatatcctctttaagccccttctgtgtttttttgttttgttttgttttgtttttgttttatctcacttccatctatttcctggttatttcaggaaaagttcttttcacaccactttttagtggattccatcctgtctctcttcttgtgaccataaaataaaatttgtcataaacaaatgtaagagtctggatgtttctacaaacatttaagtggcaggaagaagctaaagccatatttttcagtcaaaatgttagcagagattttcctgcactgtgcatgatttattttctttctttatatttttagataccttataaattgtctaaaatctcaatgaacaacatttatggtcaaataacataaagaaaaatcctttatagccacttacttactcaattgtatagtgttttgacattctaactacactatcagtatggttttctgttataacgtagtataggtatagattttagccacatagtaggtgaaataggctatgtgttaatctagactaagacacagccattatctataacatatattttatgagaatttgcattccaaggtaaaaacaactgtttgaaaagttaccttttaaacaaatccagttcatatggtgcattactttcattttctgaaggtgattcatatggaagtattgagaagagaaacatcatagtttaaaaaaggccaatcagactttgaggacaagatccaaacattatgcaactttatatcttagcagagtgcatttagtaggtgttcaataactctttgttggataaatgactttatgagtaaatgaagaaaacctcagagctattggcttcctgtgccttgaattacacttttgagtgggactgccttctgcaagccagttgaaaaatagctattggctcacagagttcacctttattttgaggactctgtcaagacaccttagtgcatgttcctagttatgtgaaagatatgctgccaatcagaatcccaatggtctccttgtatgtttcatctttaaatggggctgcgctgttagggacaggatatatcttggcagactacatggatatgaaaatttcaaatcttcccatagtcctctatctttaaggaaaatcatggcacttgtttttgaatttttttaatccatcttccagattccaaaactaggaattccaaatgttgtttggacagactgaaaagagaacaaccaataggagaagtggtacactatgagtagtcaaggtaccatacacatgggaagtgtgaaggagacttacttagtatttwcttatgtctctttgccaatatttgggagtttcacagagcatttctagataatgagggatggaagtgaagagtaggacaaggtattcaaagatctaagaagaatgagaaatcctcgatttcccatatgacaggatgacttggttacacgagtaaaytgctttttgtatgtgaaacaggcagcaattggaggtagcaaaggaatacacaggtaagccctggagtccaattcccaaaattagtggtgttttctgattccctaactgactctatggtaggctcctggtcaaaagatccatcagggctgctgggcccatgctgacattccatatagccatcttctttctgattctctgtcttccagtgatgatccagctctttgcagcagcaggattgtggctggccagaagcacacttgatttcaaaatggatgtgacgggcaggtcacctccttttctgcagaagtgtacttgcatcaacaaatctttttcctctcaggttttgaggaaatgggatcaaacattccaacacagagaaataggaggcgtgggcagcagctctcctggatctctctctttccttgaggagatcaacttgtaaaagattacaaaatgtaccctaagtggtcctagagcaccctcctatcttctttcccaagcttgtcatgtggttgcagtggacatggaaagtaaacactgctataaacagagaataataaattgtaagaaagcaccagaatatccttcttgcttgaactttgaatcattagatccaaacattccccctctctcttctcaaagttccaaagtgttaaagagttttgttctccggtatcaggagttggccacaaatgctttctctataagttcataattcctgttgggaaacttggaaaagagctctccccttctcatccaaagaagtgatgacttctctttgttagtttacaactaacaaagtcccatttctggtttgaaagtcagatggaccttggcttatatttatttaacraagacgtggaatttctctaacagactgaaagtttattagaataacatctagcattaggcctggcaaataggaggtcctcgttaagagatctgatcagatttgacttctaatcccagatataaggtgtttattctttttgagccactatttcctcatctataaaataagaaatattcataactattccataatatgtattcttatatcctgtataataaaataactaatataggaatataataaataactaggaattataaataatataagattgtaataaatatccaaaatcaagggcctccttgaatttgttatatattgatttgttgattttttgagggcagtaatcaccacgtctgtccagatcagcgcggtgtccacgccccactcagcactgtgccttgtccatagcagatgctcagtcaatatttatctaatcagtgctgtttgtattcaaagagaatgtttaacttcttactctttccattcccacctcccctttttgatctcatgtccactatcggtgtactgaggtctcctgggctctgtttgcaggaatctaaaagtagtttttttactttggtactgggacatgtaactccactttttagagaaaatatttcatgctaattaaaacatctcagggctggtctccctgcacttctcactttcacacctacatactcataccccttttctctttttccttactttgtaatgctattagagttgacagaatacttgctgcttccccagaaagtcttagccaggagttcatgaaaccctgtcaggccttgtgaaatgtacagatgtgtttcaaatgatccataaaccctgatattgtataaaatgtgtgtgccattttatggaaagaggatgatatgttttcttaaccaaaatctttcggggtacttcggtccataaaaggctaagatccactccactaatgagcaagatctagtcatttagaaaatcctgcactctctcctttgttactgcctcaatttccttaaaaagctcttataagataataaagaagccctctttacttcctacagttccactccacagcaataccagcttaagtgtgtgccttccagcgtccatcccatctctccgtctgaggggtccccactcctagtccacccaggccaggaaacccataactcatatgtaccagaaaacctcctttttaaatttcctcatgcttcctggcaccctgacctgacaatggactagtacctcatatccacttctaccatgacttctgagaaagtggtattttttaccacagtgaacttggtatatgcagtgtgtgtcaggggcactggccttactaaagtagaggcccattctggagaatagtaagaaataaggagcaatacattgatgaaatagaagggacattaagtgatggtcacagaccactcttaggactgccattaacttcagatgttaaagaagtgcttcagctctctgtgctttgtcttcttcttgacaagtgaggatgttaggattatctgccatgtcatccagcttcaatctctataattgtataaatctggttggcagtggactcgttagtgcaaagtcctaaagccttaaagatccgaagttttctcactgggcaagcaatttgcgggattacgacagtgaacttggtgtatgcagtgtgtgtcagggacactggccttactgaagtagaggcccattttggagaatagtaagtagtaaagagaaatacactgatgagacagaagggacattaactgatggtcacagaccactcttaggactgccattaacttcagatgttaaagaagtgcttcagctctttgcactttgtcttcttcttgaccagtgagaatgttagacgggattatctaccatgtcttccagcttcaatctctataattgtataaatctggttggcaatggactctttagtgcaaagtcctaaagccttcaagacccaaacttttctcactgggcaagcaatttgcgggaaattaaacaagtccaaaatattgaacaaatgaagaaaggggccattttaacagacaggaatacttcataytgtaaagatggccaggtgtagtggttcacacctgtactcccagcactttgggaagttgaggcaggaggattgcttgaggctaggagtttgagaccagcctgagcaatacagggagacctcatctttgctagaactttaacaattagctgggcatggtggcatgcacctgtagtcccagytatgccagaagagaagggaggattgcttgagcacaggagtttgcaactgcagtgagctatgatcttgcaactgtgctccatcttgggtgacagaatgggaccttgtctcaattttttaaaatatatatatacatatatatatatatakagagagagagagactatatatatgtgtgtgtgtatatatatatatabagagagagagagacagagagagagtaaagatctcatttcctccacaaatgttaaaaacattattctgattttaaaaaaagaatgaatttttaaaatttacaaatttctgaaatggacaaaaatatcctaggccttcttcctcaaaaaataataaataagaataataagaaattgcactggtatctgaaaaagcaacttaaagctataaaaattaaaatagcatgttatgccatgaaagagacaaatgagatagattcaagtttcaaaataacaattgttattattatgatacaattatattaattttgtacctataatttaaataaaataataataaataagaaaaatcactgaataaaggtaataatttaaataatttaaaatcttaaaataatgattatatgtataataaaactgtaaatttacaattatagagctataaacaattttatagttgtaatattttgtaactaatgaaacattatattttaatgattttattattgttgtaattaatataaagaagataaagaaaaatgggcaaggtttgaataagcacactttgtygaagatatatggatagccaaaaagcatataaaatatgaccaaaagcctctggtgtttagagaaatgcaaattaaagctaaaatgagattcttctaaatacctatcagaatgtctgagattaaaatgactgactgtagcaactagtggcaggaatgtggaggaactgaagttctcatacactgctggcagaaatgtacgatgacacaacccttttgaaaaacattttggcagcttcttaacaatttaaatgtacatatcccatgtaagccagccagtccactcctgggtatttactcaagagaaatgaaagcctatgtccayacaaagacttgtatgtaaatatttataacagctttatctgtaacagctaaaagttggaaaccacccaaatgtctatcagcaggtgagcggataaacaaattgcggcatatacagtgtagatagtggaatactactcagtaataaaaaggaatgaacaattgacacatgctacaacatggatgatgcaaaataattacactaagtgatagatgctagacgaaaaagagtacatactggctaggtgtagtggctcatgcctgtaatcccagtactttgggaggctgaggtgggcagatcacctgaggtcaggagttcgagaccccccaggcccacatggcaaaaccccgtctctactaaaaatacaaaaattagccaggcgtggtgatgagtgcctgtaatcccagctactagggaggctgaggcaggagaatcgctagaacccgggaggcagaggttgcagtgagccgagatcgtgccactgcactccagtctgggagacagagtgagactccatctcaaaaaacaacaacaacaaaaaaagtgtacatactgcatgatacaaaattctaagaaaagaaaactaatctatataaaaatttttctctgttattctctactgagaggggatgaggaggattaccaaggggcaaggaggaccttttggaggtgatagatgtgtttattactgggattgtgttgatggcttaccaggtatctatgtaagtcacaactcatcatatggtatactgtaaatatgtgcaggctgggcgtggtggctcatgcctgtaataccagyactctggaaggccgaggtgggagaattaaggccaggagtttgagacatagcaagatcytgtctctagtaaataaataaataaataaataaataaataaataaataaatgcacttttttgtatattgagttatatctcaatgaagctgcttttttttaaaaaaaaaaaaaacatataacataaaagagattaacagaagagattcaaaagtctagaacaccaaatattaaaggtagcttttcaaatcagtgagaaaataatgatattacagaaaatggcaaatcatctagaattaaatttctacttcatactatcagcaatataaattgcagactaatctaaattaacaatttaaaagataaaagaaactatagaaaaatacacaattatgtatctgttcttgaatggaaaaagattttccaagcgtaaatacaaagaaaaatttatatagtaaaacaatgattgatttaatttgataatttttttagaaagtttacatcaaaacaaattacaaaattgaaaggcaaatagcagtctggttgtggtggctcacttgtgtaatcctagcactttgggtggccgagatgggcagattgcctgagctcaggagttcaaaaccagcctgggcaacgtgatgaaaccccatctctactaaaatacaaaaaattagccgggcgtggtggtgtgcacctgtagtcccaactactcgggaggctgaggtgggagactcccttgaacctgggaggtggaggttgcaccgatctgagattgcatcagtgcactccagcctgggtgacagagcaagactcccgtctcaaaaaaacaaaatggcaaatagcaaaggggataatatttgccacaaatataaaagaaaaggatatatccttgctatataaaaaggtcctatgaaacagggacttagttggatatttctatttttaaaaaggcaaatcatataaacaagtgttttacccacccatcccccctcaaataaagaaaaaagacagggatggagaaagaagggggaaaaaaaaaactgagtaaaaaaattctttgcaaaagagtaaaaaagagatttgtttcctcaccttgatgttgtctttataagttgttttattttaatcttttgtttttccatattttcagagttcctacaatggacttgtagtacggtacctgggtgatcacaaacataatctagggagtagaaaagaagttcaatgactcagcatagtgttaatggtcttccagatgaaggaggggacatgaacatgtgtctgtcccaataaaggttgagacaaggtttgttgtgcacgtgcgcgtgtgtgtgtgcgtgtgtataacagtgaggagactgtaattagcaggaaaaattggggttttgaaagtagaccacagtcttgtcattgtaccatgactcmccaggaggacagaggacaagtaccctactcctgtgtaaatccagactgccaagtagagcactgagatttgatgagtacttaagaaatgcttgcttgattaattggtaaaagatattaaaggggaagattttatatcacattcaaacatatgaagagaaatgttaaaaatgtttaaagttccatttccagtctcactttccaattcttggttcaaaatacaaggggtaattagacatcgactgtgtagtcaacattatgatcaggctatataaaatcatgaaacatcatcctaaactttaaagaactttgagtttagctgggaaaatatgctcacaggaaataattatgtaggaaaagaaggcatcaaaagggcttaaagcaaccaatcacacagagtttccttgttgggaccccccccccacccgccgggccccaccccgttgatatcctaaatgttctcttgacatcttggatttaccatagagcctagtactgtctgtaaggtcctgggcctgttctaattagtgctgagtatctgttgatctgctacgtgcaaatgggaagataaaactaaatgttagattagggtcaatctttaaaactctttcctagattgtgatggtattcagtggtggttgaccatcatggaattgggagatatttgtgaatgtggctgcaggctgcatgtcctttgtgtctctgactcaagacacacccattgatctcatttgtcttcatttcatcattgggcagaatgcgttctaaaatgaagagactaaaaccttcacagaagcacactctttcaacatctaaggaaaaattgttgatgagaaaactgtgagaacattaggaggtctttaaattgcaaggggaaaggtctgttggtgaaaacagctgaaatcctatggattaaatcaacttgtaaataatgtattcttagagtctgcagtgatctcataggcatgtttaaatgctgtttcttatgactacagtttaaagtcatggtatggactttcagtttcatgaggctggcctgggggaaaagagcatgaggttgaggttgatggtgttaactagagcaactgagcccccatacagaccttctgaacttgctcattaacgaagccacaggatggaaattgtatagtgtccttgaccagagcattagttacaagttgtgagaagagaagaaataagtaagaaagaaaataaatgacttataaaaatcctcagaagatatagtccccaactgttagcacaaagaaaggatgtaaaatcatggaggacagcagtggagaagataacgttagcagacaataaaaggccaaagttttagaacagtagtaagtgtttaagaatatacataatatatcttcctccatttgctttttgtcttcaccataaatagacatgagttaacgtatgtttaaagatttatttcccttttattgagctcacccaacaaaagtttttttcatcatgtcctgcttttacaaaccaagatctaatttgacatgattacgtaattgtgtggccatttgtgcccttccttctcctcctcctttctctaaagtagaaagcctctctttcctagagcctatgtaaaatgtgttaattcgcttaatagcaataataattttcttatgacaatttatctattcactaaagtgttattaaggacctattagttggaagcctctgtgccagctgttgggaatagaaaaatttataagacactgtctttggagctttcaatctagtgggggattcaaacaattaaagagatacttttaaaagacagtgtaataagtactctggaagatgtggcagactgccagttgccttccccagcataacattttcccaatattcattaggaaaagaaccctttaattgtacccaattaaaataccgaatctcccagcctcttctgcagcagatgtggctgtgtgactaagttctgtccaataagatataagtatacatgtttggtgagatttccaggaaggatgctcaagtggrgatgactaagtcagaagaaagttccttttagctttcctgcattcctagaattctgatgcaaaagctggagctacagcagcaatcctggactatgaggtaaccttgggagtactagggaattgggatgctagtaactttctagaagcaccaactcagccccagaatgcctcctgctgacttcttttacgtgggagagtaagcatttgtgcatttaagccactatagttggatatttgaccattgcagacaaaaataagatcaaccgatagaatgccatttatgaaaaaaaaaaaaaaaaaaaaaaaccatgggagtggttctcctctctgttatgatagggagaggtcagagatgctgtccctgaagaagtgacattcacactgagacttaagggagaaatgagtgagcaaggtataggaaagtatttaaggaatatcatctgaagctctgaattagaagctatctacaagatactaaaagaagatcagcatgacagaagtacaggaattaagaagaacatagtaggtgacaaggctgaaaaatctcatagattctccattttgcagagacttatagatcatcttcaagatagtaatagctgcagagcagaaggctagagcagagaaagaactttgagagataccaatatagacatggtttctaaagtcttaggagacaataagattacccaggaagagtatttaaagtcaggagagggccaaagacagaaccttgagatccaacacttaaagatcaagaagaagagagtttcctatcttctgtttcttaaaaaataaataaataaataaagcatatcagcataattcagagtcacaaattctaagaaatcatggggcagagggcaggggtgaggtagggtttgttttgttttgttttgttttgtttgtagataaccaaaggaagaaacgattgatgcaagatttcagggagggtgaatagccctccttgtagctttgccctgctagagagatggtgggtggacaattactataatatttacaaacaggataagtctacgtcagcccctaacattctcagtttcgttatttgtaaaatggcgtaatgatacttatcttttagagttgtttgaagagtacataagagacggaaaaggatttttaattagataaggaaagcataatcacctatctttgattcattcacccttttaaactgattaaagcttagaaaataatcacatatgcagattgatcttagtttgtccacctcttgacaatcagttagtagtatatatgtatttttttatttttaagaatttttatatccccatgcattgactaatcttgccccatcatagataagactagaacaaaatattgctttgagaagtccttgagttccaaagatttaccatgaagctaatgaaacctgcattgcagagtccttcactagtatggccttttccaatgtcttgaaaggagtcctagtcacatgttcacatgcttacacatttatgtaaaatatgcaggataagataattaaactacaattatctaagatggcagtctttttttcactctgattttctgtccaaaatattcctcttgtggaagtaggtttggaatggccctgaacattttyggaatctgaactgagagaaagttgagtgaaagatacattgatttaaggcatagtgagatgtctagtaaagttattgtaaggtattccagtgttgaaaaggcttccagaaatatgccaaaaccgactgtgctgactcacatgatgtcatgccagaaagatgaagggccagagattgtatgatgacctgagtttgtccttgtgcaacaagcaccaatggcatatgagtgttgatgggacaagttttgaaatgtatggagccaaaagctagcctgtggaaagttctaccaggcattcgacatgtggtaaggtaaccaggagactaagttccgtggatgtctagtcaaatggaaattttcttctctcaagaataaacatgataatttcgtgtatgcaattctaaattcaccaaattgtgttttctttttcaatggcaatttcaggaaattaaatgatcagaatccccatgtttccaggggccaaacctgtaatagtcccacagacagtgagtgtgtctataacaactaatataggcagaaaaattcaaagacgttttctgaaatttgccaatacctgtaaacatttttaggacattgtcaaaataagctgtgaagctgaaagaagtttatttaagtattaataataaaaatttaataagctatgctaaataccaattctctttctattatctctatagaaaagattttacaaaatcattctcagatgtagaagcaatttttaaaaattcagccaaaaaatagtagggtgaaaagtattataatgatagcaggtagttaattaatagcatgttctttttctgaattttatgatgcttgtggctttgacaactttaaacattttataattgtggaatttcttttgtcgttttacagaaatattcagttttgtacctcataatttgtatttataattttgtattcttcttcataaaaagggccattgaattgtgtttaactcatgcctcaccaaacctgaaccagcattttcctctgttgaatttctattgcctgcctacagcaaggcccacgtcttcctgtaacagttgcccccagttcccttaactatcaccagggagtcagcagttaatgacatgctcaaccttcctccaattacagatggttaggagagaaaacaaagccataaggccattaaactcatgaggttttgactggtggttcggaggtagagctggccctggctatatctgccgtgtacacaagaaccaaaaataccacacttcatttcagaagatccagatttgatcccacctctgccactggtgtatgatcttcagaaatgaacttggctgtccgaacttcaatccccttattcatacgatagacctattgtgatggccggcaagctgaggtatagaaacacatattatatagtaaggggttcttcaaatgtaatatctgttctcaattcctcttctctatcattaccaaggagccaatgatgcacagctacccatgtaccttcattgtagagacacaccctgaacaagcagacaacatggcgccacatcagagtattatattagaatgtgtgtttggcatttctttagcagaggggccaagtgtaggaagggagcgggtagaaaaggaggaccacaggtgacaagagtctcccctgaccttaagcttgcagttcccactgaaccaaacagaagccctgtatgcatctggaagtccttgcttagtgggctgtgcaatgtgtgttttaggggtctcaagccttcatcccatgtagccatggacaacatgttccaggaaaacattacttcctcacttcattacattccaagtgacatttctgcatcccttcttgacgaatgttgtccaaaattggttgtccctctctttgatccagctctgaccacagagatcagttttacatacttgggtacttccccttggtgattcaagaggaggcactttccttaaatagccttggaaaccttgagacagctgctgcatccatctatgttcattgctcaaacttcctgtatggtttgccaccaggcttaggttcaaatccaaaatcaaaatcttaacatggccacccaggcgcatgtggcctcagtaatacacagtttttgagcttcatctcaagcttctcttccccttactttgctctccatgcctgcttccagctcttctgcttcacccagtccttccccatccctcatgtcacacaggttagcttctgtgcccaagtagggtcctgcttcctttcacaaagctgactcccatgagctctccagagatgatctcaagtgtcacttttgtggggataactaccccagtgacaccctcctccagatttggttagcttctcccattccagcctagtttagatggaatcatattaagttgctggcattaatttattatgacctacaaaaccatcaatagtgtacagttctcacaactcccttgtacattgcagccctcatcaaaattgttatgaagtaattgatttgaataatgattaatatctgactccctgatggtttataatctttgtggaagtagacaacatatctatcttgtctactgctatttagcacatactaaataccacctagtaaatatttgtttaatgttacttatttaactgcagagatatactttttacattttctacatttaagatgcacacggaatatgcgatgttgtggagaaaagagctatttgccaaatggttacttgttactttatttttctaaggctttgggcataaaatgccattatggaattactattttattacaatggtatctgtagtactttggccctaatgttcttttttggttatgatgctgcactatgcctgtggaatacattctggatgcatgatgagactactgagacaatcacaatcttgtaagtttccttttcttctaagataaatctcaagcagagattctcttctcaggaagagtagaacttttcacaatctcgagccaagtaaacactctcaaattgcaatgcaaaagattttgcaaaatacttgaaaaaatgcaatttataaagcagaagttgtacagatgccatggaagatctaatgaaaaatcagaaaagattgcagcacagatttaactcttctcaagacagcaaaagcaccccacatgtgacagatactcatgagaacattgggagcctgaagccccgttttccagacaaggaaggaattacgggtctctgatcacagcagaggggccctcattagacccatcaaggattgcacgtgccctgtgcaaggccacatgcgcatggggtgtgcaattaactctgcccatgctgctgaagtttcagtccattagtctgagtgaatcttggtcatttgtatccctcttggtgcctcataaacatatgcctcatagtctgcatcttcaaactttttccatactgtaaaactgtcttcgcaaaatctcatcacaagctgaaaagtgatccctggtgataaacaactgagatggttattcacctccatgactagcctttcagggcctcactttctatatccatcaaatgggaagaacaatagatgcctcatcctcctcactatgttgctgtgagcatctgttgaagtagtggctattcragtgcattgaaatgcatcagtcagtacacagatacaagggcttctgataactcatacctgaagaatttttgtcaaccctgaagggatttgcttcttggtatacgggtattaaaatactagtataatttctctaacgggagtatgatgtcactagttccagagtcttttcatagatggatgggttttatgataaataactcaccctcrgtgttaacttggctttccaactagccaaacaggcctttgtggaacaaggttagcaaatagcatttgggcaaacgatcaaaagggtctccctctcttctatcactctctttatctctcttggtacctctctctgactttctctccctcctttaaaaagttatctctgttttttttaattttttttacattaaaaacaacaaatgggcccttcagaatagtcgaaaactttagaatgcaaagatatcaaaaaataagaaataacctagatcagaaaacagataaatgattgccaggggttgggattgggaggagttatttacaaggtgaatgaagaaattatgaggggttgtggracttttctatattttgatcttgaaaattatataactatatacttgtgttaatcttgtagaagtgaacactaaaaagggtgaattttattataaacaattttttaagagaacaaaaaatgtactataatcccaccagccaataacacactattaacactttggcgtacttctgactagtctttttttttttttttttttttttttgctggtgtttcaaaatgtcattatgatcatataatacacaaatatacatatatgtgtgcatatagatatctacagatgactaagatagatgattgatagatgatagatcagtgaatagataaccaaactcaaaacaaaatagttaattcatgcaacttgcacaaaaggtacaagaaatatactatgaaaagtctccctctcccctttttccttgggcacctagctagttttgttttagtttttacctagctctcctgagacagtgtgcatatataagacaaaatatacatatacctcttttgtaatactaagacaccaaattcatacttctgcatcctgccttttttctttacttaacaatacatcttgaagatggttcaaattacacatatatagataatttttcatgactgatttttaatagctgcatagtatttctatattttaatgcactgtaatttatgatattgtattgacaaccacccgggttgtttttaatatttcatttttacaaataataatgtgataaacatccttgtacttgtgagatttcttttcctatatgggttatttatctttagtagagcttcttagaattggaattgtgaagtctaagtccacattttaagttttgctagataaagctacattgccccctttaaagttgtgccaatttttactccaactactgatatatcaaagtgtctgttcttgtatcattatcaaaattttaatatttaattatctgatgagtgaaaaatgacatctgatagtcctgtcagttagtattgcttttaatgtgactaatttttagcttttattcatgtttaaatgaataaaatgtactccctttactacttttttttttttttttttttttttttttgagacagggtctcaccctgttgcccaggctagagtgcagtggcgtgatcatggcccactgctgccttgacctccagggctcaagcaatctgcccacatctgcctcctgcctgtgttgctcagactggtcttgaactcctgagctcawgcagtctacctgccttagcttcgtaaagtgctggaattacaggcgagagccaacttgcccagccctgtatttcctttactttgaactgcatttgtgtatccttggttcatgttctatttgatagccatttcttcttaattagagggatttcttttttttagattagaaaaactagcccttttggctatgataagtggtttatatttccttttgtgtgctacttgccttttgtctttatttggcttttttttggacttgcattatttatttaagatttacgtagytggatttctttctcctttcacatatggcctctctcacttcaatattatgtagaaaaaaacctctgaaataatgaattcctatacttttatgggttctttttttattttgatatttgacccatctggaatttattttggtataagaatgaggtagattttcaacaatttattccactaaatcataaattagtacaccttttttccataaatggctaaatagtaaatattttagacttcatggatgatacagtcttggggcagctactcaactctggccttgggcgaaaaagcagccacagacagcacaaaaaccaatgggcataactgtgatccggtaaagctggtgtagacacacaggcagcaggaggatttgaccctcagattgtagtttgctcacccttggtgcagaagattacttaattattctaacaaaattgatttagtaaataattttccccattgatatgtcttggttcctttataatacacaacattattttttataggtaggtcttgtacaaaactctccatttgattttattgttctgtctttctattcataggctgggtatgacactaatttggttactatagctttatgtatatttttaacattggatgaggtcagttgctcctcaaaactcttatttttcagaattttgtgcaggaatatctgagtatttctaattagattagaatgtcagaatacattcatggacatatgagtttggggttttttaaaattttttttagatatccttcaccttgaacatttattatttctttgtgttgggaacaatccaaatctctcctagatgttttgaaatatacaatgtattgttaactgtagtcaccctactgtgctattgaatactagagcttgttccttctgtctaactgtatgattatactcattaaccaacttctcttcatctgccccccacctccacccatctcagcctctagtaactaccattttactctctacctccatgacattaacttttttagctcccatatatgagtgagaacatgcaatattttgtctttctgtgcctggcttatttcacttaacataatgacatccagttccattcatgttgatgcatataacagatttcattctttttatggctgaatagtaatccattgtatgtatatacacatataacgtctgtatatataatgtgtatataaaatgtatatccataatatatgtatatatacacatatatgtaatatatatwgtgtgtgtgtgtgtgtgtgtgtgtatatatatatatatatatatatatatatatatatatctcacttttttttttgagacagagtcttgctgtgttgcccaggctggagtgcagtggtgcaatctcagctaactgcaacctccacctctcggttcaagggattctcatgcctcagtctcccaaaaagctgggactacagtcatgtgccaccatatccggctaatttttgcattttttagtagagacagggttttgccatgttggtcaggctggtcttgaactcctgacctcaggtgatctgcctgccttggcctcccaaagtgctgggattacaggtgtgagccaccgcatctggcctcacattttctttatccattcatccattgatggacatttaggttgcttccatatcttggctgttgtgaatagtgctgcagtaaacatgggagtacaggtatcattttgatatactgaattcctttcctttgggtaaatatgtcatggtgggtttgctacatgatatgatagttctacttttagttttttgagaaacctccgaactattttctacagtggttgtactaatttacattaccaccagcaatgtataagagttcctttttcctttttccacatcctcactgacatttattactttctgtctttttgataatatccatccttactgagggaaagagggtatctcactgtggtttcaatttgcatttccctgatgattcgtggtgttgaacttttttttttttcagatacctgctagccaattgtatgtattcttttaagacatatctgttcattcctttgccctctttttagtgcttttacatatttggcttttgtttttttgttttcgttttcattttgctgttatgttgttcctggatatacaaggaactcaaactatagtcctttgtcagatgaatagtttgtaaagattttctcccattcctcagattgtctcttcactatgttgattgtttcctttgatgtgctgttagtttttagtttaatatggtcccatttgtctagttttgttttttgttgcttttgaggtcttagccacaagatcttcgcccagaccaacatcctgaagtgttttccctcttttcttctgtagctttatagtttcaggtcctaaatttaagtcttcaatccattttggtttaatttttgtaggtggtgagagattggggtctagcttcattcttctacatatggatgtccagttttctcagcaccatttattgaagagaccatcctttcctcaatgtatgttttcagtgcctttgtcaaaaatcaatcagctgtaaatacatgcatttatttctaggttctctattctgttccattggtctatacgtctgtttaaacaccaataccatgctgttttagttagtatagctttgtagtatattttgaagacaggtactgttatgcctccagttttgttttttgctcagtattactatgagctatttttaaaaaatacttccaaagaaaaaagtgcaaaagtttatattagcttactatagttttaataggttaaaattagtagcttctgagtaatgaagagagactgagcttaatttctcctgctttgaaagtacttctagggtctgggtgtggtggctcatgcctgtaatcccattgttttggaaggtcaagacaggaagattgcttgagccccagagttcaagaccagcctgggcaagatagcaagaccctgtctctaaatttttttttttaattaggcaagaatagtggtgtgtacctgtagtcccagctacttgggaagcttgagcccatgagtttgaggcaggagcacgctatgatcatgccattgcactctaatttaagcaacagagtaagtcctcatctttaaaaacaaacaaacaaaacaaagcaaaacaaaagaaagtacttctatttatttcttcacctgctaatttagcttgttcaagtgtagaagctggaggatgtttccctgcaatgacagagtagccaattttgtatctcctgattttttccttctctcattcttctttgctcaacagacactaaattgaggtttgtgtccttgtaaatagtagatttcatttaccctctgccacctttgtcaaaaaataattttaatttaaaaaatgatgtaaacttattttagcaaaattgaagactatagaaagctatgaaagtgaaaatttaaatcaccgtaacactgcactcagagataaccactgttaggacttttatttctttctttctcttctctatacacctgtaacatgcatgtacacctactgcatgcatatgtgtatgatacatgtgcaaacagtgcatgctaacattttctaccctgcttttccatgtgttatttttatcctgtgttccactattttggaaaccgtcagggttgacagagggaaattgatcaagccctttgtcttcattgatgtcaagagtttcagtcaacttggaggccgtggcctcctccttacaggcttcttcagcctttggtttgagtttgggttttttacttttcatttttggaggagccacgttctctctcctttcctattactggagagccgcttcctctcttcactcattcattgtgcagtgtgggggagtcaggacccagatgggaaagaaagcatcttgccacactcaaatctcatcttttttgccatgtttgccccatggcatttctctcagcatcttcttgtgctttttccaaaacatataaaggacaattctactctggaaagtcactgggatactgttctctgagaacaggtattgagaagaagatggtttcctcttggaacttggccaactggctcacagcgaacgtggtgtggactcttaccagctctctctagtatgctaagggcccccaaccagggaccctgaaggcatctcaagagagcagtgtccaggtctgcccttgttggaaggaggatgatgtgaggagatcacctttattaaagctgcaggttgtctgccagattttcaaatttcaatgtaactttttatttaaccaatgctgattaatagtagtggcattgttgaaatccattccccttcatttcattttctaatgaaatttcggatttctacacagacatggttttctggcataaaaagcttgcatttgcaacctgtcatattgggactgtgcagaacttttccatgttttaaaactcaggagaaagaagtaaagatggtaagagtgcacttgagcagaaacaaagggctgtgatcccaaaacaggggacaaatgagctgcaaaggagagacaccaagagcggagagcaagaggcaaagtgatatgaaagactccaaagtgctggttcagagaaaagaaaaaaaagggacataggtcaggaaaggggagaaggactgacatgaactggcaaatggcaacagatataaaaagccagctttctctggggagtggaaatgtttctaagcatttttgttcatgttagtatgatttgttttttcctaagtaagcttgaaaatcatagagtgaataggagaaaccaaagattagggaaaatatttttagaacaagctcagggaagtcatataggtttaaaatatatagtctatgcaaataatggcacacatttcagaatggaaacaaaaataagtggcagataatgtgtccaagtaatattggtagcaaatggactgttacgagagcaaatgatattttgcagagctgagagtgtgacytgtcttcaattatttgaatccctatcctacaaaagcattgaaaaaggaagatctggagccaatgactgtgtattacatatattttcattcagtacaagcagacatcatcagtgtgctatatactactttcattattattattatcttaattaaagctgtctyacgagccaggcgcagtggctcacgcctctaatcccaacactttgggagaccgaagcaggtggatcacttgaggtcaggagtttgagaccagcctggccaacatggtgaaaccctgtcgctactgaaaatacaaaaattagccaggcatggtggcaggtgcctgtaatcccagctacttgggaggctgagacaggagaattgcttgagactgggaagtggatgttgcagtgagccaagatctcactgctgcactccagccaggatgacagagtgagactctgtctcaaaaaaaaaaaaaaaaaaaaaaaaargmcaacawcaacgacaaaactgtctcatgatgaaatgggatgctttcactagccgtggttgctcatgcctgcaatcctagcactttaggaggctgaggcaggtgaatcacctgaggttaggagttcaaggccagcctggccaacatggtgaaaccctgtctctactgaaaatacaaaatttagccgggtgtgctggtgcatgcctgtaatcccagctactcaggaggctgagacaggagaattgcttgaacccgggaggcagaatttgcagcgagccgagatygtgccactgcactccagcctggacaacagagcagaacactgtctcaaaacaaaacagaacaaaaaaagaaaagggatgctttgtggaacagggagattacttgcactggaattgttcaagccaagttctatcaacatttgacacagaaacacaygaccatcgtaaggtctttcccagctcagcattctgtgactgcgtggtctttgtactgagttttacatgatatggatttcttaccttagaaggatcagtttttaaaagatgggctgaatgaatcaaatcagagaacactatttgcctacccaatatctagtctccacagctagctggggacactttatagccacgttaaaaaaacaacagcaaaaccccactgcatttctcaacttctgtagcagatggaggtggtcaagtgactaagttttagccaaagagatattagtgagaattgggagaaactttgagattccttaagaagggagacagaggatgctaacatggaacttgtcctttgccttcccattctcctttctgccatctggatcaggatatctggccatgctgaaatcatgagacaacatgaaggataaaatcctcaaactaagaatagaaatcagaacattaggacctggtctgagttcattgtggagcttccccagcccgctcagkctgcccccagtcttcccatttttagaaaaattaaaactatggtttgttaaagcttctattctgatggtctctgttacttgtagctgaacgcaatgaattgtgagatacgatttaccacaatttttttctttctttctttcttttttcttcttcttcattttttttttttttttwttttttaaagggttgtgccatgtcacccaggctggagtgcaattgtgcgatcatgactgactgtggtgtcaacctcccaggctcaagcaatcctcccacctcagtctcctaagtagctgtgactataggcatgtgccaccatgccaggctaatttttgtattttttgtagagatggggtcttgctgtgttgcacaggctggtctcaaactcctggcctcaaacaaatcctctctcctcagcctcccaaagtgctgggattacgggtgtgacccagtgtgcccagcgctgtttactgaaatttttttttttatgattctgactatagctttaaacccaggctctgccatctccatgctgtttaacaagttctctgcccttcgtctgcctcaccagatgtattatgtataaaaaaaagtcacaacctagattgcagaatttcatgtaaatcgcttacaaaacaacacagatagaaggcagcaattggtgagtttgatctttggtgcccaaatacagctgtgctatttggtgtatacaaatgtcaccaaattcctgcacaaatttgcgggcgggataggggaagaaggaagggatgatgaaggcaatggacacaacagtctaaaaagttttaaaaaattgaatgtaggtaaaatagagctcagaattcctccaccatcatctgcatttgaatctggggagaagtcagccctcccaactttcacttcctactagaatagcaagacacactctgcctccagacagtgtggattatctgccacccgaactgaagtttcaatcactcaaatcctggtgtcatttacattgtttctactgggaaaggtcaggtgtctgcaggggctataagcaaagaaaaacccatcccctggaaccaccagtgtaaaggagagggaaggcgagtgacagcatgtgtcgatgctggatcattttcaggggtaacagaccactacatcctgaggctttttagcaaataggaagctgaaggacaaacatctgaaggagaaattaatctccgtgagtaggtgacaagctgcgataagcccttggggtgtgtgtcagtgtagcacagatgttagtgtgagaactattacttgattcaagggaaaggggagaagggcagggaggggggaaatgacaatgaaaaacaaaacagtgaaaaccacaatcatcttcaccaggcagctgatttttttaaaaaggcatatatccatcaaaggaacaaaacattaaaatacacccatatggcaaagacctggtgtaactggaattttcacctcctgattttgacagtgtaaatttgttcagcccttttgaagagcaatttggcaatgtgatttcagagccatagaaatatgcacatccatctttcaaatgtcccagctcttataaatgtatctttaaaaagactcaaaaataatttttttaatttatatgcctgaggtgtttatttcagcatctctacaacagagaaaaatgaaaaccgaaggtttgacatttgagacaatattaagtaaatcaatacatgctaatttaatgggatggtattaagtaaatctaagaccagcctggccaacatggtgaaaccctatctctactaaaaatacaaaaaattagccaggagtggtggcaggcacctgtaatcccagctactggggaggatgaagcaggagaatcgcttgatcctgggaggttgaggttgcagtgagccaagattgcaccactgcactccagcctgggtgacagagcgagatcctgtctcaaaaaaattaaataaatcaatatatggtaatctaatgggatgctatgcagcactaaaagtatattttaaaaaaaacttgagaaatgcttctaagatgaataatacacaattaagtcaattacmtgacttcaaatattattataactgcatgtggacaagaagacaaaaccttcaaggaaaaaaagttttgatattatgagattatgggtaacattgtattcccagccttgaatttctgttattgttactataatatgtgtacaatttttttttagtgaagtaaaacaaacaagtaaaagaaaggttgaaacttcacaatgtagagatcaaccagcctgaacctctcattttacgggtgacaagttgaatacaaaacttcggtggaattgaacgggcttatttcagtggaaatagtgagaaatactcattttcccaagtgcctattagaggtgctgtcattttccaggagccaatagaaaaacacataaaagcagtgcattggtgtgatctgggctgtttctctgaaatcactcagctcgctttcaactgctgcgttccacaacacaatgtggttctacattaaccacattacatcataaagagatcattaaatgactccttatggaaagggagggaagaaatgatgtttagagaacctggtagtatcggaggcatcatcctccttctctgctgcctatctgtgtcgcactcactcttgaggttatgcaaagaaaatgttgacaatttaggtgccagctgttgtttgacgaatagcaaataaatgactgtgaagtcctttggaaaacagagcaaaaccaaattagtgattcccctcttctgcctcccaacatcttcacctccagggccttctttacactgactatatttcctctgatttcattgtcccaatgagacagtaatcctactgagagaacagatagggttcttggagactagaaattatgtttattgaatggttaaggcattgtttttttatcataagctataatttaaagttactaagaaaacaggccaggtctctgtaatgtagggaagcagagatcagattatcttctgggggatagtggaggagggttgtaaccaccccaagtccttgagtgaggatggaacctagggctcaacagcagaaccctaagaacggatatttttgcctaggcctaagaatgtcatcagcattttatttatttgtttgtttgtttattgagacaaggtctgcctctgtcacccaggctggagtgcagtggcgaagtcttggatcactgcaacctccacttccctggctcaagtgatcctcccacctcagcctcctgagtagctgggactacaggcacacaccaccacacctggatatagttttttttttagagatgaggccttctacattgcccagtttggtctcaaattcctgagatcaagcaatccccccaccttggctcctcaaagtgctgggattacaggtgcgagccaccgtgcccagcctcatcagcatttttagacagctacccctctgtgrtactctgtggtgagaaataagtttaagagataagtatgcagttatgaggaaagrtgatagaaccacaccatttttatgaataatatactaaaatatattcttaaaaaacttgtcagttgtatatttgataatagcatatttttacttagtccttattaaagatctcgggaaattcaaatctgtttcatctttgatcaggagagaagatgttgcccatccttagcccagagttagaaaggagaaatcatgtgattggccaaggtggtgatgagagtctcttcagaagggaagacttccagttgcaaggtcaggtgacccaatcaactgcctttgaacatctggaaaaatcttctaaaactcttccttctcaagaagtcctgcaactggagctactaatgaaagctctttccagtagcccttacagctaattttctgttcacatatttgtcttctgctgtaaagagctgtgcctcatagtgtattaagggctggcttttcctttcattgtaagggactttccaccacaaacacaaggccaycatggccagcaatgcacaaaacagcagagtatggtcggcccttaaagacaaggtttgacttactcctctcttctcttttttacagacatgtttctctactataaacttcactcttagctttattttcaagaataaaatatttctgttttcaaattggcatcttacgattcagcagactaacccaagaaataattttatggaataatcatawttcaatatcttatttcttttcaaaggaacatttaaaagcttataaaactaggtataacaatgaagctgtaaaagaaagtaagaaaacacaatcaaagttaaaatgaaccaagctaaaaggtaaatataattattggtgttaggctccatatttgcctacaggcttcctaatattcagagcaaaatggaaaacaaactgttatcctagctcaggtcacagatcgctctggccattcccttttatctgccctgtgtgctttcttgggctcttcttctgttaacaggactctttttttctttggggaggttcttctccaccctctgcctagggctgtcaatcaatgtgccccatcttctacccttctgcataggacccccattcccttgacatggtgattttccagaggatgggtacctaggtacctggccaataagagttcgagatcaataagagtcttcccagaggttaatacatatgctttggaatggagtttattgcccactaaagatgctaagctggaaaaatataaattgggrctatccattggctaaattccctgccctgaggagcaggcctgtctccagtgggaggaagaaaactgaacagaggagaattgcaaatggagagagagcaagccctgtgtactgagttctggcttctgtccctgaggccctgaaacctggctgctgcagcttttgattctgaccatgatccaagagtccttccaagcagtgagagcaagtaaattccattctttgattagcaagtctgagtagaactctgccacttaaaacaaaaaaagtccaaattaatacatctttcattattggaaaggaatcagaatatcagtttaacaaggagcccattttattttctaaaattaattttgaaagaattttctcacatgggacttaatagcgcatattgactgatgtaatggacaatgccctcaaccacatttttacagtaaatgcagaagcgaatttcatctgatggtttctagtataaaccttgaataaaagccaagggcataacattaaagcaaaattgagttaaagccattttggaagaattagcccagtgcacatagagtgttcaacatttgagtggctcaattcacccaagaaagcttcaagaagttgaaggacactttttaactttgacagctttcttcatgtgttcctttgtttccccatttacccaarcttctgataaaggttgaataacaagtattttgagattctaattttcaaccagagctaacattttccactactaagtgagaaagggatctaaatgcttcagagactgggggaaattagaggagagcaaagttatgctacttgtatctraatataagaccacttgtctctgcacagaattgacccctgtgggacctttggggatacctgcaagatatgcaggctgtttttttctatcaataaacyttggattttcaacaacacaaaaacacatcatcaattagatccccagagtcatgaaccaaaacagttttcacatgaaatttattcaaagtaaggatttgtagttacctgttgtgatatgggaaaaccacacagcagcttggcttccagtgtgctttccagagtgaattagttttaaagtgtttattttctttattccctcctccccaatttcacccagtatctgaaccaatgtatccatcaaagtagtgtaatcagagagtctgcctagaaatgtattttagttaatcatggctaataccaagcccttctttctcccagaaatcaggatgatgtccctcttggaattacttttgatttgtgactggttttgatcatgattacacttccagtacctggcgtaatacctagaacaaactcccagtaaatatttgccaaactaatgatagaatcagatttatattttgaaatgagcactctgaatatattctagaaattgtattggatgaacacaaaagtagagtgggaatgcagatgaaaggctctgtgcccacccagaggagggccgcttgtggcttaattcaggcagcaataatgggaactgagagaattgagctggtttgagagatatttaggaggtcagttggtgttatgaaaagataagggagaaagaaggaacaaggccagctagacatgttgtggggcccagtgggaaatgaaaatgctgagtctctcattaaaaaatcattaggaatttcaagagggtaatagtagagcaccaaactgtgcattgtacaggacttttactcataaagccagctctaagaataaaacatcctatattcattatgcccggggygcttccatttactcactgagtgcctaccatgacagccactgtggtaggtacttaattctacctaaaagcaataatacaggattaggatagaagcccaaatgaagaagaaaccaaacatagctccaatttatagcacctaagagcattttcacctgtaaggaattttttctatttttacaggaaaratcaagggatttgccctgattcttggagtacttaagtgcaaattttgaagcatttcaattgttgaaaacatatctttttttwatatactttaagttttagggtacatgtgcacaacgtgcaggttagttacatatttatacatgtgccatgttggtgtgcttcacccagtaactcgtcatttaatattaggtatatctccaaatgctatccctcccccstcccccaaccccacaacaggccccagagtgtgttgttccccttcctgtatccatgtgttctcattgttcaattcccacctatgagtgagaaaatgcggtgtttggctttttgtccttgtgatagtttgctgagaatgatggtttccagtttcatccatgtccctacaaaggacatgaactcatcattttttttggctgcatagtattccatgrtgtatatgtgccacattttcttaatccggtctatcattgttggacatttgggttggttccaagtctttgctattgtgaatagtgccgcaataaacatatcttttttttaaaacttagcatatatctatttgccatctcctgggtcaaaaagccaatggaaagctcaatgaaatctccaaatattcttaggttcaccttgacagatttttttctgaagagcaaaagagactataaaaaaacacttatcaaacatgagagattatgccttaaaaccacttaactcttatttaagatactactctgaaatatgtagatctgaaaacagggaagattaaaactcattttgctaatgagggcttagcccttgaggactccctgggtaaaattgtattatgggcattatctgggtccacactctgccctcaataacaagagaataaaactctcctctggtcataggtggagaattagcagcaccttgacattttgaaagaactagtctatcaaaatatataacagggttgtgacaaaagaatgaatggaaaaatcctctggtaggggtaattgcatatgattgatataacaaattatgattcagcatttactgagctcctacaggatgccatccattgtgtcagatccttctgcatgtgcactgagttaaattctcactgtaagattgacatagaccttatcactgaagatattaacaaatcctatcagttgagggaaattcaggttatgagaggtaaagtggtttatccagggttgtgtagctggttattggcagagccagaacttgaagctcgatcaactccacctataggtcaatactgtcctaagatttctggatacaagtttctgtattttcaaggacttcgttcatgggatttccccgtatcatgaatacctctctcttctgaatcatccctaatgcttgtagacatgttccaatatccctcaccttcaaaaacaaaaagaagatgaaacaaaaccttcttccttactgcactgctgttctcatttgctctgctccctttcacagacctacttcttaaaaaggcatttgtcatcaccatctccactttctcacccaaatttatttattacctttttgcttctatctccacattgccaaattcagtcacttttctgttcttattttattatgtctctggcagtatccaacaaagttggccattctctcctgcttgaaatactttttttaataatatattttgtcatctataacaccatatatcctcggtcttcctcttacaatccttttcggttttcctcttaccatctcctcgtagattcttcttctggaatacttttgccagttcttctgtctttgcttaacgaataaatgtagagtgtttctggaaatctttttctatatgctctttttaggtgacccctccagttgcttggccacctgtgtgagccatgtatctatgactctcaagcatagtctctcccctggacttcagacttgaccacccaacacccaaccaccaccttgaaatccccacttggatgtccagaagatttctcaaacttcacactaataaaacagagtcctagatttctctcctccaatcctggtccacctcccctgtgcttctacatctcagtaaacattaccactctccacttaagaaccttaagacagaaatctgaattattcctttttacttcctcatcaccatactaactcaatcagtatgccctattgcctctacctgtgaaacatctaagtccgttcactttttaaaacattttttaagttttttgttaatgcataataaatgtccatagttttggggtacatgtgataatttaagacattcatctaatttgtaaagataaagtcagtgtacttgggatatccatcaccttttaaaagtatttgtctttttataagctagaaacattcaaattattcttttccagctatgttgaaatgtacaatagattattgtaaactatagtcaccctactgatccatgtaacgctagatcttatttcttctatcaaactgtatatttgtacccgttagtcaacttctcttcatggtcacttttatacatatccatttctttcacccaagttaaagttactatcctatcctgcccgggctacacatggtctcctaacttcaacctcattggtctctttcgatttcttaaatataccaagcagattctttccagcttggtgcctccaaggtaactgtttcctctacctggaacactcttcccttgatccttgcatgatttgctttgtcttgtcattccatgaaaataacttttactctgaaaagccttagccaagcccctaaagtagccccacagtcacatccactctcctgagcacttgttaccatctgattatgtttgttggcttgttcgtttgytgactgtttggaatataagcttcacgagggcagctgtgtaccctgttcaatgggacatcctcaacacggaggcagggcctggtacagcacagtcctcaataaatacttgataacaaaataaataatttatgttgcattttggaataataattatattcttagttacacattagctgtatctagaagactgataatactgggggaccaaattaccttttaaaattatatttaagcctactaaacaacaacttctgagttaacaatattaagacaaataaagaatgacatggctcacaattataaatcagctatggttaaagatactcttaaatagtaaaaaataatcaagaaaatgttatggatttggcctctcaaattatgaccctgttgaactatacaaaatataaacaaagaacaatatctgaaacattattgaaatttactttataactgaaagttagtataagcagttaaaactgaaagtaaatatagacaaaataattgaacatatttgacaaaatatagacatctaaaagtgaaaagcattttaaaagtgagaaaactcctagagagtttgaactattatatggtattttcacctttagattatgaatagcatgaatgagatgataacaatggtaataacaataaattcactataagttcttakaatttagaagataccattctagaagctttccatgaattatctcattaactattactgcagtcttatgaagtgagtattatgatcatttctaatcttatgcatgacaattgagatttaaagagtataactttccaaggtgacaaatttagcaggtgtcagaatccagttctgtcagaagaaataagtagaaaataaaggtgggtttgttggcgactagataatcataataaacattgatataatcgtttataatttttcataamcgtagaaattatacaacctgtgtaaagccaaaatactttggtgatttctgggttcagaagataatgccttttgtagctatggagcttagatcttgtagctatatgtgtttgactgagggaagtggaaattctctaactgggatatcataccaggatgatgaattacctgtgcaaactctcactattgcaaggtcctatctacctggaaatataagattaaggtttgcaaatccacttgggtaagtgtgtctcaagattttaacctatttacttataataattttcgtatttgccacctaagttttatacacaagactaccaaggaatagacataagttgcaagtggtcacagcttgacctgaaaacctatatcagtaaaccagtggagctctccttagaacagtaaggaaaagaagtgtaagatatgacttcagctgatacagtcagcaaatacttcttggatctatctgtcccatacactggtccaggccctggaaattgagcagaggtcaaataacccacttccctcatgaaacttacattgatggaatgaactactttttatatatttaaaataaaaataatatgaaaacttgaggtaatgaatgctgggcacagtggctcacacctgtaatctcagcactttggaagactgaggcaggaggatcatttgaggccgggagtttgagatcagcctgggcaatgtagcaagatttcgtccctactaaaaaaaaaaaaaaaaattagatgggcatggtggcacatgcctgtagtcacagctactcaggaggctgaggtggaaggattccttgagcccaggattggaggctgcagtgagctatgatggcattactgcattccagccttggtgatagagcaagaccctgtctctaaaagacaacaacaaaaacttcaggtaaaagtaaacctttctttcctttcatgtcagagaccacatattgcaatgagagtgaaatcacatgaaacttataaataaaactgcccttctatcagaatgaaagaaaggacaggaacaggtcaacttggttattttctctctagacccgtcattgagggtagccaccagagggctacctagccatacctaggtcacatacctaagtaacctgatacaaaactttctcctacctcctcctttttcccacctgtgaacctaacaccctgaaatttagcatctagaagtatctaaatgaagacagacatataatttttgcccctgagctcccacccttttggactggaattggacatatctctggagccacaaatcagagtcacatagatgtgactgccagcttttgtgacttggactcagtatctttttactgcgccaccttacgtttcactcagacaccatctggtgatggattggtccgtcatgcggtatcagtctgcagaatcatcttcagtactttaaggacagtgcagactagaggaaagattccaggttagatgtcagctatttgccaattagatgacctgggtatgtaatgagaatgcatagccccacttcgtctggtaaattgggactgtaattcttactttgtyttagcccacaggatgatatgtatagaaagtgagttataaactgtaaatgaagctgggcacagtggctcacacttgtaatcccagcattttgggaggccaaggagggaggatcacttgagcccaggagtttaagatcagactaggcaacatagggagaacttgtctctagaataaaatagaaaaacatagccaggagtggtggtatgtacctatagtctcagcaacttgggaagctgagctgggaagatagcttgaggggaggagttcaaggctgcagtgagttgtgattgcaccactacactccagcccgggtgacagagcaagaccctgtctcaaaagacaataatattataaataaataaataaacaaactgtaaatgrtacaaatataaaagagcaatactaacgacaaataataatacatataatgaatgcattgataatgacagtgaaagttagaagtgattcttttagcacagagataagagattagctcatggctcaggccaggcctcacagattatctgtctcctggtgggactaatgcaagatctgaagtttggtctgtaactttgtcattttggtttgttctatggaccaaactctggagtactgattaacatcattgtctagcagttgaaagctctctgataaccttggrgagtgctagatagaatagatacaattttgccttttgattttcctttgcccaaacaagtggttcacatatgaagatgtcttttggaagggaaaaataaaaattacagattcccatgtaatagggaaactgagtcttaaaatccaacaccaccatcttatttctaagtcgtttttacattagggcttgttataaacctaggttattttgttttgcctacgtgtaaatcttgatggattcaaaaattccccaagtaacttagtgagatttcaaaaagrtccttgattttagcagcgtttttataaaactgtcagttacagtagataacaatagcaattctattctcctccattttaaactggaatttactgattcaaatttttaagagaaaaagttcctgaacttgtccccttattctaggggaaaccattttggtgcctgtctatagctacttatggcctctctctcttgttttttgagacggagtctcgctctgtcacccaggctggagtgcggtggcaagatctctgctcactgcaagctccgcctcccaggtgcatgccattctcctgcctcagcctcccgagtagctgggactacaggcgcccgtcaccatgcccggctaatttttttttttctctatttttagtagagacagggtttcaccatgttagccaggatcgtctcggtctcctgactcgtgatccacccgccttggcctcccaaagtgctgggattacaggcgtgagccaccgcgcctggctggcctctcttttttgaatgaggtaaaaaagaagcttgagaggcaaaacaaccaacagcaaataaccctagtgtattcattcattctcacactgccataaagaaatcctggagactgggtaatttataaataaaagaggtttaaatggctcatggttctgcaggctgtataggaagtacagtggcgtctgcttggtttctggggaggcctagggaaatttacaatcatggcggaaggcaaaggaggagaaggcacgtcttacatggtaggaacagaagcaagaaagagagccaggaggtgctacacacttttacaagaatttactcaccgtcacaacagtaccaagggggatggtgttaaaccagtcaagagaaaccacccctatgatccatcacctcccaccaggccccatcttcaacactgggaattacaatagaacatgggatttcggtggggacacagatccaagccatatcacctagtaatcatcctcaccttcagttaaagcagcctgtgtgtttactrawgaaattagctacttgacaccaatcttttcagcaatactgctgtcagataagagaatcattgagtaaaatgccattaattgcaaataataaaacgtcattcattcaaatcacgtaatgagaagtttgaattctgtctccaaaaccaacccttacttttgtttatttatttttacctagtacccagggcatgattctgtctatgctgtcataggtctttagattttagttgccattagcaggcattttcattcaatttatttatttatttagagacagagtctcactctgttgctcaggctggaatgccgtggtgcagtcatggctcactgcagcctcaaactactggcctcaagcaatcctcctgcctcagcctcccaaatctgtggaactgcatgcatgtgccaccacatctggccctggaatatgattttataagaaagctgtctctctattaaagttttatgcraagaggaaaactaaatcagtggacagagctaagagttagacracccagactttcctccctccgttgcctctgtttctgtctttgcaaaataaggaaatttgactagcttatctttaaaacctctacttgctcattctatgatggtgccttgagatggagattcagtgagagattcttgtttcagtgcttttatatatttaacaaattttcaccgagtacctattacgtgtcaggacctgctctaggaaatgtggatacaacaatggacaaaacggacaaacctatgtcctcatgtagtttacattctaaggcctataaagtattgtctatttgaacacataaaatgtattctcccagtttgggcagaaacaggacttctgcaaggcctggagaagtaaggaagactgaagcaaatggaatccatggcactttccaattttgtactttctctttctgtctctccttactttcatttcttgacctactcctagacccatgcagataccaaattttacaaattttactaccagcaaatagttatctattatgcagttaaactgtgctatgtgtagggatgcagagcaaatcaagacatagcatatgccttcaagaagccaatgatgtccttgtgagaacaaaactcacatatgtaaaaaawaattgctagttcaaaatgtcagaggctgagaaccaggaatatggcctgaacagttgtgtgctctatcaggagagattcactaaaagttagtagacttcaggaataattttcagtgcacataaagcttgaacttaagtaacataggtagttttcagattttaaaagcaattttcagtaaatacaagtagagatatggcctgcaaaataagagtaggatatagcaagacacatttcttattcttctgacaaggtagtacacagttcatcactttattgacaagatttattgatgtgactattgtgatgtcatcaacaatggctttgaagttcagaacatgagaaagagctaatggtagggactgacttgaaagcctttgcattctaagaatgatgattaggtttctaatgtattattaaataatgtccagcccacaaaaaagatgaagtctgcaaaggtatacacaataactctgtgccttgctatggtcctatctgatctcaaacaagaagctctttgggttgtgttgctggtggttggatgtgttctgagccatagctaggcttatgcacataacaaagtctgattcccaggaatctttttaggaaacacctcccagattaagtaatatttacctacttgtcctctttgaacagtgctcctactgattctttaccctaatgaagttcatgtcccaacccacacccttttcctaaaacaattaagcttttagtggtgacatgatgaaaaagaaaaaaaaaaaatagatgcaatggctgacttttggaaagttcccagcaaaaaaaaatcccggtggctttctgagtctcagcatgtttcttcttagttctgtgtacactgagataaaagtagagtgggagactgagtttaccacctgtgctaaagcagcagctgttagcattggtgacattcattgttacatggatatcaattgagctgggattaggaagccgcctgtctcctcaagcttgttacgattcagtcacttggaaaaaaacaaaaacagactttcggatgaggattctaatkcccaggtgacctgaaagccaggttcagcgtagtcaatgagcaacatgaaatgaaatttccaatcagaattctcattagccttattcagcactacccagatggatgttccttttgatgtctttgtcatagcagcctcacctatgcaaatattgccagtattaccccttatagtaagttgaagaacttttaagggttgtgaactttacataggtaagtgaatcaagtatacttgaagagcctctctgttgacataagtaattagattattggacaaagatctgatctagtaattttcttagtatgtatgtgtgccaaagccaagagaggatatgttattaattagcaagcaaaatttctaacgtaggggttttcccacatcttaagtaaaattctcgaaacctggaactatggctggctctctggaggtgtttcataaatgcttgctgaattaatgaatgtatccacaggcatcttttaagtggctacaatgacattaagaagaaataaggtcacagagtgtagttgccgcctcaggctctgggaaggatgggtctggaaacaaccccacagtagaccatacacattgtttttgagactttcagctcatccatttggttactgattacaagacggtttttttttttcgtctcaaaaaatgctttatttctcagaatcccatttcagcattattggtttttccctcaccaattctattttcagctttctgccttttctcataatgacctgtaggtgataaattagtaataataaaaatcaataaaaaatgataaagttttttttgggggggaaataggaatgagtttcatgttaagaaaagaaggaacgttccagatggaattttctgtaatgttaaatgtacccatatggcttctgggaaatttaggggcatccttttgtattagggtaacctaatgccacctgctttaaaaattcatattaggaaatagccacattttgaccttcttgaacgatgttcctttatcaatcaaaaatataaagggtgttttatttattagtcattgttgaaatccgtaatctctttctatcgccaaattgtcttaaaacgtctgtccagcacatcattgcaaccttgactgtcccttccactgtgtgttgaagagtcacaggtcccagggggagctgcgaagaaacgtaaaccaaataccatttcagtaactgttaagggacaattgtgacgattttgtaatgcttgrcatgttttgcttataatcttgtcctacaaagaagcctatcagcagagatgagagatttttgctatgcaaagattagattaatattgatatttgcagaactgggttcaacctgtgggagacctagtcgcaggtcttgtagaatttatagcatattaagaagatatttaaatatttggcttcagtgtgatggcctcatttctacatacctttctaatatgtgccaactctctcttcttcatttcacttgtccgctgaaagatgagtcatcaagtctggttgaacctatctaatatctcttgaatcagtatgtctctgcatctgtattgccatcaccctagttctggccatcctcactgaccacctgactttctgcctaaatggtctcctactttctggtcttgtatactttcaaccctttctctgcaatcagagtgatattgcttccartgttgtacagacaattcttacaaggtcctgcagcttttctttcagtctttctttcttttttttttttttwttttgaaatggagtctcactctgtcacccaggttggagtgcagtgggcgcgatctcagctcactgcaacctctgcctcccaggtttaaacgattttcgttcctcagccttccaataactggggttacaggtgcatgccaccatgcccagccaatttttgtatttttagtagaaagagggtttcaccatgttggccaaactggtctcaaactcctgacttcaagtgatctgtccaccttggcctcccaaagtgctgggattacaggcgtgagccactacacccagctctttcagtcttactgttcgtcatttttttccctcccctttctgcaccctcttcactctgctttcccattctctatgcctgggctacatcttaaaagacgccatgttctcctggggtctctggtgtccctgattctggaaatgctttcctgtctcttctctctamcccatttcacttagataagtcctatttatccttgagatttctcataggtggcagtctttttcccataagacttttcctgttctagacctggtggctcacacctgtgatcctagcactttgggaggcacagccagggcgaatgaacccaggtgtttgataccaacctgggcaacatagtgagactccatctctacaaaaaataaacaaccaggcrtggtgatgagcacctgtagtccaggcatggtggtgagcacctttagtcccagctactcaggagsctgaggtgggaggattgcttgagcctgggaggtcaagacttcagtgagccgtgatcatgccactgcattccagcctgggcaacagagcgagaccctgtcttaaaaaaaaaaaaaaaaagaagaagaagaagaaaagaaaaactttccctgatatatttaggttgagactagacaccctcttatctgctcccacaatgcccacgtcctccatcactgtactgaccatactctggtaattggctgtttatctgtccaatgccttccctagaccagaagctcctaaaggacagagcctgtattcccattcgtagtaccagcgttcagcacagtagctggacctgactaagcaccaagtaaatatttgttgaattaagaaaattaaaaaaaaagtgagaagtcaacagtctcttaatcaattgtaaagaaacactttactaggatgttctgacagctactccaaagtatcaaatattttaagtgaaattgtgatgtctggtgacattttttcaatattttagatttcttacacacaacttattttattttcatccactgaagctctcaagcatcttgttaaaataaaataaattagcttggtttctgtatgtgtgtgtgtgtccttttttggggggaggggggctggtggcaggacagggtctcactttgttgcccaggctggagtgcagtggcaggatcatggctcactgcagcctctacctcctgggctcaagtaatcctcccacctcagcctccctaatagctgggattacaggcatgcaccaccatgctcaggtagggttttttwaatttttcatagagacaggttcttgtcatgttgcccagtctggaatatatatatttttttgacttttattttaggttcagtgatacaagtgctggtttgttatatagataaactcatgtcacggggatctgttgtgcagattgttttgtcactcaggtactaagcccagtacccaatacttactttttcttttcctctctccaccctgaccctccacgcccagatagacaccagggtctgctgttcttgtccttgtgtccatgtgttctcatcatgtagctcccacttaaaagtgagaatatgtggtatttggttttccattcctgtgctagttcactgagaatgatggcctctaactccatccatgttcctagaaaggacatgatctcgttcttttttatggctgcatagtattccatgctgtatatgtaccatattttctttatccagtccaccactgatgggcatttaggttgattcctatatattttttaattgacaaaaataataacccacagaatcactaagtaggggaaagatcagctgctgatattttggatgtacttttctcgagtccaaaggataattcagtcaacttaaaatagttatttaaaaatgtgaacagaatttgtggatgttgagacagattcacagatccttaggaaatattaaaacttttgaaaaatggccacaggctctgaaggaaaagagcagttgggcacttaatgccacaagttactcttataaatcattatgctaatgatagaactgaggtggttcatttgggaaaaaaattgaaataacatttaggaaaagctgagaggctggcgatcaccattatgaagacagcagcctgcactattattagatgccaccaataaggggaccatatataactgaaggatgactttaggagtcattgtaaacctgtcttctgacagcagcttgagacaggaattgcattcttcctctaaatccttttaatttagtaaagccctttattgaaacatttacaagcaaatgtaaacttttaaggattcttacatcccataaaagcagtaattttggcatatagctcatcaacatgaaatgagtaaaaacatgggaaggcagtactttttgaatgttgtatgccatttggcaaatctacatgttcctcccttttttcgcatctccatgttcctcctaaatgaaggagttgttgttratgttggtttactttaatatgtccaattataccattatcatctatttatcaaaatagtgccatttaattgccttttgctttaagctgtattttatatgaaagattcctagtgttatttctgtcctttggaatattatccagcagagggaattttaggatctacttgataatacagatttgctaatttccacgttagtacttcagtgttgtttagttacacagtttcgggcctcatgatgtgtttgatgatttgggagtgataaaatgagtcttaagtaaaaatcttttaattaaaacaaacaaaggatcagtttttatgggaaaccagtcagtcagcaagtacatgtgttttaagtccagaaggatgctcaagtggaggggtagagagagagagcccttgggatccagggattgtagagtaactgctcccattatgccaggcctagcagggctgtcccactgtctctgccctcacactgaccacttcattactggttgtttttactgagcatcttttcagagatttctgagaacatggtaattttcccagaccatacacctgagagatcaggtactatgttgcctttaaaaacaacaacaacaacaacaaaaacctttatatttttcctctttttatggtgaaatatggcatactttattatttggagaaagacagaaaacatggtttttttctcccacaggccacaaaataccatcttcctcttacagggaatgagacttttgtataaagaggcacaatttcctgtcccactaggagaaaattattctcttgtctgagtctcaacagaagcttgtgttagttgctgttataaattaaactactactcaacccagcagtcccattactgggtatatatccaaaggaatataactgttctaccataaaaacacacgcatgcttatgttcattgcagcactgttcacaatctaaaagacatgaaatcaacctaaatgcccatcaacagtaaacaggataaagaaaatgtggtacatatataccatggaatactatgcagccataaaaagaacaaatttatgtcctttacaggaacatggatggagctggaggccattatccttagcaaactaatgcaggaacagaaaaccaaatactgcatgttctcacttacaaatgggagctaaatgacgagaatacatggacacatagaggcaaacaagagacactggggcctattgagggtggagggtgggaggagggagaggatcagaaaaaataactgttgggtactaggcttagtacctggatgatgaagtggtctgtacaacaaacccccatggcacaagtttacctatataacaaacctgcacatgtacccatgaacctaaaataaaagtttaaataaataaataaacttggtctccagtgttaaatatgatatgtcatcatcctcatttccttcatccagctattttatattcctcccatctgctctgtcctaatatttatattctgtaggccttatcgtgcatctcttattccttctaaatatgttttaytctgcctggttcctccactcttttggctcttgttttcctacttcctttaatgtaacagtaacacagtgagcacttaatagcagtctagaataaactctgtgttcctgctttaatctatatctggtctttatctctcacctttatctttacctctgtcactgtgtggacttacactgaaaacagaactataccatgcccccatctccatgctgagtagctggtttataaatcaggagagacaatgctctttagatattcttaaatttgttataattctttcctgttatccagctcctcaacctcccttcccagctctgtctaccactttgtatcacttaagccacgttttatctacgtcttctctgtcactaacctttagtcccttgaaacaggcacaaccaaacaggactgacattttgcaagtcccttgagattttgcctaatccttcacagcaacctacaaagtcaatctggggctggtggaaattctcctctttcagccttttccttcttttggaatttgggggtgttttcacagagtgatttaccaagaaaacattctaaatcctcaaggatcacttatcccttacctcgtggttgtttgctcgagaccaagcacaactggacatttttgaacttacgwctttctccctaccctctttgttctccttctcccccttcataaaatctgacttcagtttggccttcaagtgagattgacttttagccccttccatttggcaaatccttcaacaaaaaaacagaagtgtcatttttacggggtgacaaagcattaagaagatcgctttttcagccttgctgtgcttcattataggtaagtcctcatgtggcaccttttacaagaggaagtattgtcatgctaacaaaatggtttcagatagtatgaaatcagtggtgagaagaatggctataaggaatgggctctacaattactgtcactctcagcaaaagagaacgcaaggaatgcatatttcatctcatggcgacctgaggatcgtcctcaattccatatgtaatactttctaaataatggtgacctttttcacgtccccttcctgtatatacaaagtactatgtggataatgcagcctgagtgagcttatgagctaatgcagggatttttattattaacaataatmatagtgaacaacagtttattcatgtaagatcaagcaactagtaagtggtagaaccaggactgggtcatagggtaggtacatgtgtaccacttttaaatattgccaaactactttgcaaagtattgaattattttacattcccaacagcagtgtctgggaattacaataatccttatcatgcaatgactggcgtattcattctttttaatttttgacattctaatctgtgtgtagtgccatctcattgtagtttkaatttgcatttcgctagtgactaatgatattgagcatcttttcatgagcttatttgcatatgtatgtcttctttgctaaagtgtctatgcaaatcttttgcccatttattaggttgtttgttttcttatattgagttataactttttttttttttacatattctgcaaacatttttaaccagatatgtagtttacaagtgtgttttcccagtctgtttcttacctttacattcccttaccagtatcttttgcaggaaagatgttaaatctgttgaagtgtagtttatcaagttttttctttggattgtgcttttggtcttgtagctaagaaaactttgcccaaacaagataacaaggattttctcctatttttttctaggcatgttatggttttaggttttacctttatgtctatgatccattttacattaatttttatatatggtgcaagttatggatcaaagtttagttacatgtggatatccaagcatcctaagcatcttttgcccaaaagataatcttttttatactgagttacctttgctgctttgttaaaaataaattgactatgtgtaagtctatttctggtatctctattctgttctattgatctatatatacttatccttaaaccagtaacacgctgtcatcatgactttagctttataataaatcttgaagtctggtaaattaagtcccccaatgtttttctttttagacattttttttggctactgcaggttctgtgtattttcagaggacttttaaaatcaacctgtcaatttctaataccaaaataaagttctttagaattttgattgggattctcacgaatgtgaagatcaacttggagaaagctaacaacttaatattgagtcttatctctcaacttattttggttctttaaaacttctttcaacaattgtttttcacatagagatcttgtatatattttgtcagagttcgcccaaatggtacatttatttatctatttatttagagatggagttttgttcttgttgcccaggctggaatgcaatagcacaatctcagctcactgcaacctccacctcccaggctgaagcgattctcctgcctcagcctcccaagtagctgggattacaggtgccagccaccacacccggytcattttgtatttttaatagcaatggggtttcactatgttggttaggctagtgttgaactcctgacctcaggtggtccacctccctcggcctcccaaagtactgggattacaggcatgagccactgtgcctggcccaaatagtacatatttttgatgctattattaatgacattgttttattaatttatatttcaagttgtttatttctattacagagctttctctactatgctgacatccatctgaggtctcttctcaacagaattgmctttaatgtccacatttctaccaagcttctcttcaaggaaatctatattttttctattactcaccttaaaattcttgtagcctctatccatttcccaattccgaagccatttctacatctttaggtgtttgttagaggagtaccccactttctcgcatcaaagtctgtatcagtcagtgtttgacagagaacagaaccaataggagatggataaataggtaggtaggcagattagtaggtagatagatagataggtagrtagatacatagatagataatctatagatatctaatgcctggaaagctaatttttctatatattttctctattattttagttgtttcagatagaaggacaaattggatccctgttactctatcttgaccagagtgaaaatctgattaacttttaatcctcagtctcctcatttgtaaaaygaaaataataataaaatctatttcatgaggttattgggatgttagttttgttaatatgtataaaaacttggtgccttgtacataataaatactcaataaatgtatttaaattttgaacaacatatttgacatattgtgattwmcaagtatctatactcttttatgtttgttaatgttatatatggaggcaatctgacttaacatcaaaaaaaaaaaaaagaccattcataagatgtagtcagtaccagtaaatgagagcacattttcctctaattgggtgtgtggatattggttttcaccctacttggagtttctgactatttgtcctagtgaccatcactatattcatttataatattattaaaatcaatggatgagtcattggttaccatgtgtattccggttctgaaacacaccctcctcttccccagccagcactcacctcagtgatacccagtctattgcaggttttttatgcattttctaaattacatgaaagcaagttgacattctttctttgtcttagtcttccataccattattttggcatgtttaaagtatcatccatctgattatgtttggaaataaaagcatgaatttgttaaagacatgtaccttccaaactgcacacttattgtgttttcactttcttatcattgtcccttcattagagaaaaaaatctattctgtgaagtatttggttttttatgcagtctgctctgctctaatatacacaaacacctgattctgcaatgagaattagttggtatgtgattgttgagcagggaaatagtactatttcacagaatttcctttagtttatatatggatttttcttggctgaagaagccagattactggagtaaaattataatctccagcaaaaataaaaaaagaaaagtccacagctcagcccctcctctaaagagttgtacagcgcagccttccacggctcatagcttacagcaggtctcccttccctgccaccaccctcacagcaaccccactggctgagcactctgtttttatttattgtctgagcactcatcagtgcagctctgtttaacatgttacctgtatttccacccaaattttttttttttttttttaagaccaggtctcactctgttacccaggctggagtgcaatggtgcaatcttggctcactgcaacccctgcctcccaggttcgagcgattttcctgcctcagcctcccgagtagctgggattacaagtgcccgccattatgcccatctgatctttgtatttttggtagagacagggttttgccatgttggtcaggctggtcttgaacccctgacctcagatggtccacccacctcagccttccaaagtgctgggattaattacaggtgtgagacactgcacccagcctctaatattttttagaacatccattgtggtagcctcctgccatgctgaacagttggcctgggtggtgcaagttatctcccaattattgggaggtatcaattatcatttttgtttggactttacaaagttttataggttctaagtgatatatcccttctgcagtttttctcataagttctgtttatacagtatgtgattttgcagaatatgagttttttgagattatatatattgcaatatcatagaaacctttttgtttgataatctttgcttaaaataacctcatttattttgtacgaatgtacaaaaataaaacaatgtagtacttattggctgtttttgtggactgaggtagagatgtcaagaagttcaagccaaaaaaactgaaaatagttaacagaaacaggcaaatctcatatatcttgccctgattattttttcattagagtccctcctattgaggaaggttcattagcatgtgatgaaacacattgagggggattaattaggaaatataaaagagtctcaaacttctgatataaggtaaaacacgttaattttatgtgtctttaaaaatgtaattagaaccttctgtttgtcttttctgagacacgtatttaaaatttccctcgactcaactgataatctgtgattttgattttcatcccaaagtgacttttaaaaaagttttggggttagggggatgtggtggctcacgcctgtaatcctaggactttgggaggccaaggcggggcagagggcggcagatcacctgaggtcaggagttcgaggccagcgtggccaatattacaaaaccccttctctactaaaaatacaaaaactagccaggtgtggtggcaagtgcctgtaatcccagctacttgggaggctgaggtaggagaatcacttgaaccccagggcaaaggtattagtcagcagagattgctccactgcactccagcctgtgcaacagagagagactttgtctcaaaagaaaagttttgggtgaaaagtagaaaaaaagtcataactttgtgtagagacttttccctcctgtaattctttttattatcaaatatcaggtattatagggtataagccagtgttcttttttatgatttccagaagtgttaaattttccatgtcttctgcatttgaaagtaataggtttggaaagagaaaagctgttcattcttcaagtacatgtaagtttaagtaccttgcagactttgttttgcaggaagcttccttgccttctccccatatcacctctctgcacctcttcacacccatgagggtctttatagcagtgcagtccataaattgttttgaggtaccaataccagtttcttggatattttcttacttaggaacataaatacttaggctgccattgcgttaataaggaaatgctggatagtcagaatcctacattaacccgagcctaaaatctgtagtatcgcttcaaatatctatgtagaaagcatagtttattaaactaaacatctcctgtaatcccagcactttgggaggccaatgtgggtgaatcacttgaggtcaggagtttgagaccagcctggccaacgtggcaaactmtgtctctaccaaaaatacaaaaattagccaggtgtggtggtgcaaccctatagtctgagctacttgggaggctgatcacttaatttaaaacttaaaagacctaatatccagaatctataaggcacttaaacagattcacaagcaacaaacaaacccattacaaactgggcaaacgacacgaacagacacttttcaagagaagatatacacatggccaataagcatatggaaaattacccaatatcactgatcatcagagagatgcaaatcaaatccacaatgagataccatttcacgccagtcagaatggttattattaaaaggtcaaaaaataacagatgctgacagagtaaagggaacgctcatacactgctggtgggactgtaaatcagttcagccgttctggaaagcagcatggcgattcctcaaagaacttaaaatagaattatcatccaatccagcaatcccattactgggtatgtacacaaaggaatacaaattgttctatcatgaagacacctgtacacatatgttcatcatagatagcactgtccgcaatagcaaagatatggaatcagcctaaatgcccatcaacagtagattgaataaagaaaatgtggtacatatacaccatggaatactatgcagccataaaaatgaatgggatcatgtcctttgcaggaacatggatggagctggaggccattatcctaagcggactaacacaggaacagaagagtaaatactgcatattctcactcataagtgggaactaaacaatgagaacctatggatacatggaggggaacgacagacactggggcctacttgagggtggagggtgggaggagggagaagatcagaaaatatacctatagggtactatgcttattacctgggcgatgaaataacctgtacaccaaagccccatgacacgcagcttaccaatataacaaaccagcacatgtacccctgaacctaaaatacaagttaaaaaataaatacataaaaatttaaaaataaaaaataaaactgcaaacgtgccctgctttctggcagtaccccattccctgttccttagttttctctctggcacttatcatttatctattttattcattgtctgtctcccttcactagaggttcatgagggcaaggattttcatgttctgtccactgctatgtccctaacacttaaaaaaaggctttgcattctatagtcattcgatgaaataggctgaatttagctaaaagggagttcatgtcctttgaagaaacatggatggagctggaggccattatccttagcaaatgaacacaggaacagaaaacaaaataccacatgccctcacttatcagtgggagctaaacaaagaaaacacatggacacaaagagaagaacaacagacactggggtctrctgagggcagaaggtgggaggagggagaagatcagaaaaactacctatcaggtactatgcttcatacctgggttacaaaataatctgtacgtcaaatgcctgtgacacaagggtacctgtataacaaacctgcatatgtacccctgaacctaaaataaaagttgtttgtttggtttttttgtttgtttgtttgttttgagacagagtcttgttcttgttgcccaggctggagtgcagtggcgcgatcttggttcactgcaacctctgcctycttggttcaagcaattctccctgcctcagtcacccgagtacctgggacaacaggcgcctaccacaacgccaggctaatttttgtattttttagtacagatggggttttgccatgttggccaggcttgtctcraactcctaacctgaggtgatctgcccacctcggcctcccgaagtgctgggattacagttgtgagccaccacgcctggcctaaaagtttttttaaaaagagaaaacactttccttaccctttgtagctcattgtctatctaacacaccctgtcactctcatcagccttgaacttcttacaaagccattcaataaaatgaaaggaaataggtgcagtgggccccctctgattcgtggctttgatttctttggtttcatttatccacagtctaaaaatattaaatggaaaatttaaaaaaaaaacaattcataagtgttaaattgcatgccatkctgagtagcgtgatgaaatcttgccctgtyccactctgtcccatgcgggacatgaattcttcccctttgtccagcagttcctcactgtctatgcctccgacctgttagtcactcagtagccctctcagttattagatcgaccatggcagtatgggggtgcttgtgttgaagtcacccttattttacttcctaatggcctcaaagcacaggagtagcaatgctggagatttggagctgccaaagagaagccctaaagtgcttcctttgagtgaaaactcttaataaggaaagaaaaacattgaatgctgaagttgttagatcttctatctgttgaactgtgaagaagaaaaaagatatttgtgcatagtatataaagggtttcgtactacccacggtttcaggcatccactgggtgtcatggaatgtatcccctgaggataaggggggattactctatgtattttcgtatccttacatcacttacattatttttcctcagccttgttgaggaaaataaaaacacagaagccaagaaagaaatgagcaagcactggccgggcacagtggctcacacctgtaatcccagcactttgggaggccaagacgggtggatcacccaaggtcaggagttcaagaccagcctgggcaagatggtgaaacgccgtctctactaaaaatataaaaattagccaggcacagtggcaggtgcctgtaatcgcagctacttgggaagctgaggcagagaattgcttgaacctggaaggcagaaaagttgcagtgagccgagatcatgccactgcactccagcctgggcgacagagcgacactctgtctyaaaaaaaaaaaaaaaaaaaagaaagaaaaaagaaatgagcaagcactgaacacctactgtgtgcaaggcacttgatagccttcctgttatttcttcctcactacaatcccatgaagtagttcttatccccattttacaagatacaaaaattgactctcaaaaagcttaagaaatttgcttctagttgcacagtcttatagattttcacttttataagataaaagagcttattcaaatccaagtctgtttgaacctgacaaggaaagccttctctaaatagagtatctgaatccctccctgctcgaaagtctcctttatacgctcatgtttcaaaaatttcacattttttgagatatagatagtacccacccacatcacctctgtttttatggaaaatttacacttaagtggcaattattttaatcagatcgacatcctagagagtgagagttcattgaggaaagaaggaaggtacatttttggatcataatgaggagagatcttgatatttttgaaatttgttttgtcttcccatggtacaaagttttaaaagtacaaaaatatgaacagtaaattctcccttctctcccatccctgtctctagccacccactcctcttctgaggcaagagcagattctgttgccaccttcccaagcaggtagtgcctttaaaaaacaaaaaacaaatgttcacctactatatgcattaccatgcaccttacacttttcatttaataaatataccccagcaatggtgatagcagattttggaccagcagtggggataaagaaggtcctggtcacctaggtgcctaaagagaagcagrtgaagagagaagaccctggagaaatgttttcctgttttgcacctgcaggtgcttgacatgcctctgaaaatgatctcagtgctgtgcagttccacagctgcagtggtacccacaatgccaaaacttgggatgcaaaggggcgggggtaatgacaaaaatcagggaaggaggaaccatagcaaccacctgatctgcacactcatgtattttatatacctctcttcaatgcctagtgtccttagacagtaagctccctgaagacacaggctatgcctactttattcatcatcgtgtcttcagtgcctagcaccctgcttggtatgcattcggttcatgaatatatgagggaacctgctgctgctgttcagcattcacacctccatttcaaccccatcagaaccttyttcatgcttcctcttttgtagtgtctcagaaactcattctgttttcttcttcatctttttttttttttttttttaatggagtcttgctctgtggcctaggctggggtgcagtggcatgatctcagctcagtgcaacctccacctcctgagttcaagcaattctcctgcctcagcctccctagtaactggggctacaggcttgcaccaccacacccagctaatttttatacttttagtagagacagggtttcaccatggtggccaggcttgtcttgaactcctaatgtcaagtgatccacctgccttggccttccaaagtgctgggattacagatgtgagccactgtgcccagccttcatcttcatcttaaaacttcttccatgttcgctgtggctggggacatgatattcctctttccctcccagttgctcctaaggatgagcaaaaagctcttttcacgtcaggggttgtaccgccaatcactaaaaggaacagttgaaatatcaaacatggagaaattgcagtgattacaaaggaatgcaatggggcaccatacagatctgaatttgccagtttgccatatccaggctgtccctgttgcctctggtccaccttaagctaggtgcaaacccagttggaggaaagaaaggaagttatgtgttctctcttcaaggaagaaaccagataccagcctcaaactcttgttcttaggtcacttctttccttggtccatttcactcctcactctccattcaattaaaggacttgcagattaggttatttgcaagtatttctgtaatttattctcctactcccatttgaagccaccaagcctgtttaatattaaataagcaaatgcttcaagtactatggtgacttcttctgtgcctttgcaactaaagccttccaacagcagaggggagaaatttatatctgttatatacatagatgagtaatttgggaatataaaacaaatatccttcttagaaatatttaaacacagatgcttgattttgtctgatctttctctctcttttttttctctccaaacaactggttacccacacttgtacagtcatgtagagacaaaatgctcatttataattccagataccccatgtaattattgcctatgataatcaggtaatctttatgaaactattcctatacaattttcaaatctcagtttacaatcatgagtattttaccataatcttcataatgccctcttgawtatatttgcttaatatcattttgaatttagtgatatttaagttaacatattttatatgttttcatttcattagtaggcttttaaaaatttacttttttgtgagaatctgatttttgtgagactctgtgaacaaatatcctcactaattctttctaatggtataatgtgaatttgtcattgacaagtgttacaaaaaagacgcatagaaaataaaatattttaggtaatcctaagatagctcttccgcagccagggcaattgggctatgtgtctttgggttgattgttagctctgtcctaaatctctgaatttggagaaggaaaccctggatttgaattccagttcctcaacttactggctccatgttcattccttctttgtcaagccccctaacttccctaaacttcagtgccctcatcttaaatataatgacataatagtgtctctcataagattggtagaattacatgggataattcatcttgcatggtcaggggcacggtctcgggaaccagactgtgtgggtttgagctgctcagtcttggacaaaagattaaatatatctrtgcctttgttttatcatctataaaatgggaataaccatagtaccttattcaaaggttgttgtgaagattaaaataaattaatcctgtaaaaatgcttaggtttctggcacatagtaagggcttagtaaaaactaggtatttttacctggtatgtgcaagcactgtatrtatcctgatatactttctcatctataattctgtttctgtgcactagtttatatatttatttaatggaattattttctacagatttagtcagattttagaacacaaagcaagtggatacttagtagccataggggaatctgattttgatgtctcctacccaaagtttattcatatttaatattatatatacataagtcttattctttctcttcgtcctttttttttaaaggcaagatctgccttcatcttcggttttctttagtgcttagaagattgccttgctagtgataagtatttttgcttaataagtatatcttgactgtgaaatttgtcaccagttttgaaaggaactctggcagcaaatgaacaaacttaaatccttgtggccagggatcaaaggcaatctcaaaccgaattctataataaagagaagtttggagagagaaagggagtttagtgtaaactcaacttttgaaatccaaaggtatcaggctatcatgggaagagtgtgggattcagctttagccctggggtcacaaagtcatgggtatgctcttatataagtaacttaatcagatctctgtttcctcatctgtaatattaattcccttctcctatttcatagaaatgcttaaaatttttaacagaggtaatatatgggaaaatgctttgtaagctataaaattagtgtacaaatattagggtcactgatactctgtgacgcaattcaatgatttggtagaagactatatatatatgtgtgtgtgtatatatattttatatatatatatatatatatatatatggccaaccatatatctattagtagctctctctatatatgttttaaagccaggctggtcttaatcttgtctattgaattcattttgacaagaacagtgtaggatccattagtcctttacaatgaagaacatattaggtgagtcaatacttaattccaaaattttactttagaataagagggatgtctaacatcaattgattgaaggctggaggaaagagcgtggagagaaagaagtaacacactgctctgtgtttttgtgcctctgtctccagaataaaagtggacatgcccttcctcctccttacctctctctctctgtatccctttcagtacatatgtccaacactgccatacacagcctcgctgaaagtatcaggcaaagggagaaacagtgagcattcctacctccagccttgacaacaactatgaagtgtgttgctctaagctctgatcataagggaattagaagcactatgattttttaaaatcaaaatatgcctgtagctccaaaaaagaagaatttgactatagggtctcagctcactgctaggagaggtgtaactgattaaactctggtgcagaatgtatcaggatggaaggaatctgagaagtcaccaagttcaaatccttactttcagtccacagagtcatcctgctgcatttcctttttatgcctgcaaacaaaatgtttctggaactcatttattgtcagtgagtgctccctgggctctgaagcccagagatgttcctccataactcatcagaggcttgggtcatttctgagacaataagttactgctaggtcactgaacatacttggggtaggcagtggggaaggggattctgtgataagaaggtgatcatgtgttctctatttataggaaaatgaatcattctcagggtgatgagcatgtgtcattaaactgttttcctgatcatgaccttgcaccaagctgtttgccctctttgccctgttccctcaggctcagtggtcagggagggtgggccagctggccgagatgtgcagtccagtccagagttcaagaacagtttgaactgtgagactgagagccaagctgactaggtcagagtgagaagccattcctcagcatatgggagctgttagttagtgccctgaagctctctagttatttggggaaggaatgggagaaagcacttagatccctgctgggctcattacctttaattagcttgcttggtctggtggctactgcagagggggaaatctccaaaaactgcaaaaagattgtgcatgatggtgggggaagatactttaagaagggaagaagactctgttgagcttccacaaagaacaggttgttcatacctgaatgcacacagggaatgcacaaattttataaacaagaaggctgggtttgttttttttaagtttttctgtttttaaatttctgtttatttagcgggtacaagtgcagttttgttacatggatataactctggtctttcagtgtaaccatcactcaaatagtgtaccttgtacctattacgtaacttgtcattcctcaccctcctcccaccctcccatctttytgagtctccaatgtctattattccaccctctatgtccatgtgtactcattatttagttcttacttataagtaagaacatgcaatatttgactttctgtttctgagttatttcacttaagataatagccttcaggtccatccatgttgctgcaaaagacatgaattgattcttttgtatggctgagtagtattccatggtgtatatacgttacattttcttgattcaatcatccattgattgaatggtgtcctttgacttatcaaataaatggtgctaggaaaattggctagccatatgcagaacaatgaaactcgttcccctatctctcaccatatgcaaaaattcactcaagatgaattaaagatttaaatgtaatacctgacactataaaaatcctacaagaaaatttagaaaaaactcttctgggcattgcctagggaaggaattcattactaagaccccaaaagcaagcaaatgcaacaaaagcaaaaataggcaaatgggacttcattaaactaaaaggctttggcacagcaaaagatataatcaacaaagttaacactcaacatacaggatgggtgaaaatacttgcaaagtacacatccaatgaagggctgatatctagatatctagaacctatgaagctgtttttaagaacagaatgaggacatgagccaacacccaggattccagtggaaagtgaacagagcaggcacagttaatggaaaatgaacagagcaggtacagttaatggaaagtgaacagagcaggtacagttaacgtcatactttacctttttccatttgcacttcacgaagagatgagctttgatagttaacttctctctctttttctctctgttttcttcttgtgcaaactgggtgatgacattgactctcttcacaggaaagcactaagtgaggattaactaggtaatgagagcaaattggaagggtgatggagatgctccgcaaccttgctgatggatttctcccagcgagagaatctcttcaatgcatctttcatctgtgtcttacaggcagggtgtaccatcgttatctctgcattctgcttaagccatcccctccaaaccctgcctctaaggagctttggcctattccttgaaaggattcttcagttatcccaccaacaatcagaggcagcaggactcaatatccccctgtatggagaaaaactgagacaggagattgggctaagttgtcagtgattcacccccattcctgccctaaggaaaggatctttttctttccttttttttttttttttttttttgagacatggtctccttctgtcacctagactggagtgcagtggcatcatcatatctcactgcagcctctacctcccaggctcaggcagtcctcccaccttggcctcctgagtagctgggactacaggtacatgccaccatgcccagctaatttttgcattttttgtagagacagggtctcagcatgttccccaggctgggctcaagcgatctaccctgctcagcctcccaaagtgatgggattacaggtgtgagtcaccatggcaggccaaaagcatcttctcaaaaatctttcttccaaaatgtatattatacaaactttctggagaacaatttaggaaaataagtattcaaaattcttagaaaggtgcatgattcttgcccactgaattccactttcagcacatgaccattagtctttcatttcttcttctcttcttcacaccagagtgtattgccttcaacaaagaaactaaccacttttagacttgtaattaacctgtcccttcccctcatctgcccacctgactactgaaagtccccagagtctgcttcttagtgggacaccagccttctgcaaggcacttattctctggttatgaacctgtttaaggaaatctatatatttgcacagaaccatggaaatatagatgtgaacaggcttaagtgatcacaacccacattttttttttttttttgagatggagccttgctctgttgccaggctggagtgcagtggcgcaatctcggttcactgcaacctccacctcctgggttcaagcgattctcctgcctcagcctcccaagcagctaggactacaggcacgcaccaccatgcccagctaatttttgtgtttgtagtagagacagggtttcaccaagttgaccaggatggtctcgatctggtgacctcttgatctgcccacctcagccccccaaagtgctgagattactggcatgagccaccacgcccagccagcccacactttttatcagatgaggaactagagactctgagaagacaggtggcttatccaagagttcatacttattcaaggctacagaataaaccagaatctggggcctgtaactcccatatgggcccttctcgagttatggagacttaacggtgtgggacacaaaataggaagaagtagagtaaaactttataaagtaggaaaagaaataatgtttgtactatgtataatggcacttcaaaatccaccattaggagtgtctacagtttcctctgcataatttagaggctgaggccatgtacctcaattcagtccagttttctatccaagaggtgcaagctctaaaataaaggaaaggaatattctttatcagtcatcagcttaatctcaaaatattgtgtgctccataattgaccttcattagggcattatggacaggggcttactatatgctaagctatgtaaatacagatgctcctcagcttataatggggttgtctggataaatccattgtaagttgatccacacataaccctattaaaagtcaaagagcatactgaatgtgtwttgcatttgcaccattctaaaatcaatgtgtcccwtgtgtaaaatcagttgcatccgaaaagcctgaaacgtgtacatattctttgatctagccatcttattctaaaaatcaaaataaaatcaaaataaaatcaaaatataggtaagttgaactgtcataagttggggaccatgcgtactctgatagtcagtgttatgtatgaacttgaccaagccgcagggtcccagacatttgtccagccattaatcaggtgtgtctgtgggaatgtttctggatgagatgaacatttgaactggtagattgagaaaagcagattcgtctcccctatgtcagtggacctcatccaatcaagaccggaatagaacaaaaaggctgagtaagagggaactactcctgtctgactgctttgagctgggacatcaatcttctggccttcaagctcaaatgcaaatatcagctcttcttgagtcttgaggctactggttttcagactagaatttataccattggctctcctggttctcaggccttcagatttagactgaaactacactatcagcattcctgagtctccaaattgctgactgcagatcttatgactttccagtcattccattccttgtcataactctctttctctttctttctctctctctcctctctctctctctctctctctctacatatatatatatatatatatatatayatacatatatatatatatatatatatgaacagatacatcctattggttctgtttctctggagaaccctgactaatatacagttatgtgtcacttaacaataggatataytccaaaaatgtgtcattaggcaatttcatgatttgtgaatatcatagaatattcttacacaaacctggatggtttgctgcacacctaacctgatgcacactgaggctttatgggatagcttgttgctcccagactagaaacctgtacagcatattactgtactgaatactggaggcaatttctaacacaatgacaagtatttgtgtctctaaacatagaaaaacacagtaaaaatatggtattataatcttatgggaccagttgtatatgtggtgtgtcagtaaccaaaatgtcattatgcagcatatgactgtatatatacatttacacttaatcctcacaaaaaccctctgaaataggtactattgttttgattatcaacctaactttaaaactgggaaattatacatagactggttaagttcctcgcccaaagctacacactgcatctggaaggagtctgaattcacccagataccgcgtgctccatctgtttgattcacattctcctaattgtgtcccaaaagcctgaaacatgtgcatattctttgatctagccatcttatcctaagaatttaccctaagtaataatcatggatgtattcaaatatatcgcaaaacatttataacagtaaaaatatctaaacaacttaaatgctaaacaataataggcgattggttaaatgttctatgatgtagttactcagtgaaatactaccttcattacaaaccatgccctcaaggactatttatttacttgggtaatcattcaagctatatagatgagagtaaaaggcctgttacaagcctgaggagagatggtaactaaatatactgtatgctcgatgagaccctgaaattacattttaccatgtttccttaggcttgtagcattccatttttacttctattctgaagcagaaaaaggagattagataaaaactaagaaaaccttaataaaggccgggcgcagtggctcacgcctgtaatctcagcgctgggattacacacatccctgtttttaaaagtgaaatctgccttctatagaacacattcccccacagaaatatactacagaaaacagacctaataaagtggagttttgttcaaatgcttccctcacaatgatgctttaatttgctgaggaacatatgattgatcctagttcacctgctgaacatgcataggcagtgtgcatctctagcacactgattaaaatgaatacccagaggctcaacatgatttcttattaatcagaacatacacaactttgtgaaagggaccttagagccattctctgccccagggtgaactgggacacaggtatagaaacctccaggactctgttggaagagtttttcttctaggttttttttttttttctgttataactgtcctttccaagattaaatgatgcctaggatatcacatcgttcagaagaggttgaaagagggagttatttataaatcctgaaggttctaggaggtttgggcttagaccactttggactcagagaaggctgtgaggtaaggcatgttctaatcttgttgatggaagtcctaatgtgtcttagaagatttctggtcatcactgtctttagggactcagagtcttcctctaagttagtttcaggaccctttgaagtattggcattgctggctcagtccactggctctttggccttcacctgtctgcattatggttatagctgagatgccaggaaaaacacaagatgagtctgttcagctcgaagctgactcaactggtttctaccacctcaattcaaactaggaatgagatatttttcttcctttgctttttagggcaattaatgttcccacatatctccctttttcttgccatttcttarcatcctaaacactaattttgcaaaataatgttgtaaatgctttgcatagtcactatcttatgttgcccttcctgttcacaagacagccgtccgtgtcagttgaagatttctatagatatgcatcatctctgatagataaaggcatgtttcagagactatcctggtgggagtattttacttttgaaaccaactaaatctggttttgctcctgtttgtggtactttatttctccctgtagcaggagagtagtgccaacgtgcctggaaaatcaagtttcaaacctctattgcattttaagccatgttttagaatcttagggtcaattaatattagagttcgacaaaatctctgctctcaaacaaaattatatacaaaagctcagtaagtaaaccaggtaaatgttaaggtgcttcggttgaatctaggtttaggagtccagagaatctaactcaaacctggcagctggaggatacccaagaaactccctgggcttagtagtgtacagtgcgaaaaacagcgatctcatccatgtccttcattttagggagatgatacctaaactttgtgggttttatttcaaagtcacatgttaattagtggcattgtgagggaagcatttgaacaaaactccactttattagatctattttctgtagtgtatttctgtgggggaatgtgttctatagaaggcaggtttcacttttaaaaacagggatgtgtataatcccagcactttgggaggccgaggcaggtggatcacctgaggtcaggagttcaagaacagcctggccaacatgatgaaaccccgtctctattaaaaatacaaaaattagccaggtgtggtggcacgtgcctgtagtcccagctacttgggaggctgaggcaggagaattgcttgaacccggaggtggaggtttcagagcaagactctgtctcaaaaaaaaaaaaaaagaaagaaagaaaaagaaaaaggatgtgaaaggaaagagtttgcaaaaaaaaaaaatgcggcaatcacaatacatttatgtctattcatattatttgaatttgtcattttcttcagtgattttttttccttgggttgttcttatttctacatcattatgtttattatatgaaggaagcagtcagcctcatgtttattctctggtagagaagaggaaaacagtaatttttgagcatgaatgcataagaccatacagtttatggaaatggctgtagcttctctaacctttcccctttcatacayacttgtttccatgtacacttcattccccctttttccccctttaactctctttgtatttgtatccctccttccctatgccctttttactcaattcattccctacatcacaacctgtggtttttgtatctgatcatagttttcaccctattgaaaatcatggctggccaagtacatgttaacaggaaaattctggacagtccctttgtacacaaaccttactgcttagtttcatctgtgcagattgctgtatactcagccctgcagcagagagaccacactgcagcctttagtaggaaaaggataggaatgacaatacactgcagacacttycgtgagtaagttgctaaagcgtcagtaaaacatcatggtgaggcctctgcaatcagcctgcttagrtttaaatgacaattctgtcacttacaaatatataaccatttggatagttatgtttgcactttaagcctcatgttagttatctggaatagtatataatattacctacctttagtgtcatcataagaattaaatgatttttgtgatataaagtgttaagtgtggtgccagaccctggcaaagttggtaattgtccccttccttccttccccgctttcaccttccttcctccctccctccctcccttccttccttaattccttctgtccttccctcccttcctcctttcacctccttcccttccttccttctttccttctgtctctttcacatgccttctttctctcttcccttccttccttcccctcaccattctatgagggcataactgggagggttaatagaatggatatctaaagcagcgattctcgaatataggcttttaaccagcagaatcagcattacttgacccgaaaacttgttagaaatgcaaacacttaagtctcacccctaagctcctgattcagaaaatctagggttagggtttaactgtctgtgttttccttgtttttgtttgtttgtttgttttgycgttgttgtttgttttttgtkgttgttttgttttgtttttgagacagggtctggctgtgttgcccaggctagagttcagtggcacaatctcagctcactgcagcctcaacctcctgggctcaagcgatcctcctacaacagcctctgaagtcgttgggaccacaggtgcaccaccacgcttggctaatttttgtatttttggtagagacagggtttttccatgttgcccaggctggtcttgaactcctgagctcaagcaatcctcccaccttggcctcccaaagtgctgagatacaggcatgaagtcactgtgcttggcgttttaaccagcctgccagatgattctgaatttgaatatyctggtgagaggttttaaatcatgcaagtggctgtctgcctccagttaaggtaaaaagggaaaggcctcagcttacactgtggttgagccatatgacaggacatacaaacactattaatattactagagaagcaaccagcaccgttttgaatagctcagtctattgggggtgtgccttctactcaagatgtaaataaggataggaaaaatagcactagtatcaactgccatacaattatttagtcacccttgggtaactaaacagcataggtatgttgatcaaaatgcccttgagtaattgtcagtggaattttgaactctccccaattcaataagatactgctgcaggtattggtgaggtacagggagcatctaaatggactgtctttcattgtcttccttgaaggttctaaatctttgtttttctggagaatattataggatagaatgtatatcagaagtgagacttgggagacctgtgtgacctcccaagcatgacaatattcacagatattcagatccatagaacacttcangaaattgtctttatgttcaaagatctcatagaacatttagttggatacccttcccacacacatctctccatttgataaagagacactatcttttcaaactttctttttggtctttacaagaagaaccctgttaggatattctcaagatttgttctagtcacacgggggtgaaggggaagggggggtgtgttatagaagtagctctagatcatttagcttaagagttaaattttttgcaaaaatactttgtggtggatttctgatgccagtccgcataggacttttattatcgtaatagtgttttgtctttcttttttaagattaggaaagtatattcaccataatatttgttgttaatcacttattttttatgcacccttttccaaagcaactatattgtccttatcttgaaaaatgaaaataatagcttccagataaatccttatgatagttttgctatcactagatagtggcagagggaaacagaggaaaaggagatctatgcattgtctttgaaagtcaagattattatactaaatgtttttgaagcattttgaaaatacagcgatatttacttataattctcaactatattacagttactggatctaaatgagaagtttgttcatctgtaaagtatttgaatgctaatggtattcttctagtctagtgcattcaattaaaatataacgtgtgttacatatgaagttaaaaatgtttagtaaccaaattaaaaaggtaaagagaaataagtgaagttaattttaataatatattatctttaacctcttttaataatatactctctttaactctttaatatatttaataatatattctcttttatatacatagaacattgtcatttcaacatgtaatcaatataaaaaatatcaattagatattttacattctttttttcacattaagtctttgaaatttagcacgtattttacacttacagtacatcttaatttggactagatgcatttcaggttcccaatagccatatgtgtctattggcgttcgtatcatatttatcatggcagttttaaatgtattaaaatgataagtctataaggtatcttcttaagtaaattctcccaagtataacagatatcagaggtaatatacacctacaaataattattgctaaagtaaaatttgtaaagctattgactgtcagtaaatatgtttaagaaacagtttttcgtattactctaagattgttcttaaaaccagcattgcagttcagtagacaagtgcagatatttgaaataagatgtttttatactacctatgtttaaatttcatgagcttcatccagcactggattttctggattctgagatatgctattcacatttcaacatttatgaaaacagaatacatcttacaattaatgtgttcatttaatgtaatcatacttcttgttttcctgaaactgagttggaaatcatcatggaaaataggttcttctcaacacaggaagagttctcagctattgtatagttgtgtttttgagaacatgcttcagcacttgagagatggatttcctagagtttttcttaaggatcaaaattaaaaggtggaaatatacaaacgctaaataatggaattaagcattggccttggataacagaaggtgaaggagataagagacaactttctgttccagctccactttaaccacaggggacataaatatatgggaccttgtagtatttaaccttgttaatatctccatactgttttgcagtaggygttggaacagagcttcacatttttctggtggaggagccagtgatctctggatggtgaaaatattctctaaaacagactccacaactacaatgaccagtacaatgtgttttctatgccgctgtcctctgtcaaggggcatcacaagtggctggcctatattcatgtaaaggtagaactagamcccaatcaatgtgccctataaatacccaagtctttaaatacccttagataataaaggtaaaagatgcaagaaaaagaggactgggagagtggrccaagtttatagttctttcaaagtctatttgaattatttaaaaccattctttttttgttaatagattttaattctcatacatgtcacatgtttcttttgcagaattcaaaacatttttaaaaacacccatttcaataatattgcatgcaaggtaaacaagaggttagaataactagtacaacataacgcagcttgactagaatacctcgtcataacacaagtacatcttcttttacatttatgcaaagtgaaacattgtctgtctctctccatagtccagaaaaatctgtggggtaattgctcattgtcccttcacaccctgtttatattgcgcgtcttctattttaatagtcccaataaacagatggaaccacaaaaacacagccgggatggctcagttggtcaatggcatcagagaacttaaagtgcctgatgctgatgactcttccagaaggcaatcctcttatgagggtcagggtctagagagtccacgttgctgctcgtactctctgtgtttaattccagctaacatgacaaagtgcaagcgtatgacaaggactttcagtgtgaccatcagctggaagaagccaagtgcgtacagctcccggtggggtggcacatgctcctcttgtgacttaatggtggcttgtggctccacttcccttgggggttgtttttgttgttcttctctcaggaccacatttattttgatgttttaaaagagaaagaaaagttccaaaaacttcctttctcgtatttcctctttgagatccagcaaaatttctacaactggccttttccagatggcttgcccagaattgctgagagwttgaggcacctcaagctctgggctcaacatcgaaggttctttaaatgtgccttttatcctttagtttctgtcacttgatgatgggtgaccaccctcatctctctctctctctctctcttttttttttttcctactaaacatgagattactggaaatatttcatgattggatacatgctattggttaatccatttaaccaaactcccatcaatggatgtggagtgtttacaacatttttgctcttataacagtgcttgacaatgtagggatttgtcaggttttaatccaaatagggctttatgatacttgccattatactatcagatactttttcccactgatatggtttggctgtatgtctccacccaaatctcaccttgagttgtagtcctcataatccccatgtgtcaagggcgggaccaggttgaggtaattgaatcatgggagcagttttccctcatgctgttcctatgatagtgagtgagttctcaggagatctgatggttttataaggggcttcccccttcacttggcactcactctgtcctgccccttgtgaagagggtgcctgcttctcctttgccttctgccatgattgcaagtttcctaaggcctccccagcagtgtgaaactgtgagtcaattaaacctcttttctttataaattacccagtctcaggtatttcttcatagcagtgtgagaacagactartacactcatcttttgaatacattatgtgaagtacaacaattttttccaaaccaaaccagacctggctaaatcctttactatagaccccaagattgagagagagggaaaaaggaattgatctgaatcaaatttgctgttatcaagaagtagggtagggaagggaccaatatgagatgtacgaaaattggctcccaaagtacagaaaaataaagatttgacttgcctactcctggcataccatttgtaggttctggccaacatctgcccttctctgagcctggagcttctctctttcaaatgggagataattgctgggcagctagagctcacaggcacgccgcatgatgagtgaggtcatgttaataaagccctgggaaagaaaagcaatgtgaaacagcagggctattaccgttccaagacgattttatacaagtgaagcttaagttcagtgtgatgattaacaagctattagagccaagttattgattcctctatctttagagtagctaatgcagtgtgcaccaataggccacagaccccaagctttccttcttcctgtgctcctgttctttgtaatgatgctttccttaggaaaatgaaaatcacttcgcatacacagtgcaacatctttaaggcaggtgccagcagagaggaaaaacacctaagctgattttgtgtgtttttattattttttctgataataaagattaatgcagatacatgaaaaaaacaaaacataaaaagtaggaacagaaagtcaaatactgcatcttctcacttataaataggagctaaataatgtgtacagacaggcataacagaacggaacaatagacactggagacttggaagggtgggtgagtgagcagggttgagggatgaaaaattaccttagaggtacagtgtacattatgtggatgatgatttcactaaaaccccagacctcatcactatgcaatatatccacataacagaactgcacttatacccataaacttatatttaagaaaagaaatagaaaaaagataatttttttaaagtagaaagagggaaaaaagtaaagcatcatcccaatttctttcaccctgaagcagctagttttgctaatatgatcatatacctatccacacatatgtatatgatcatattaaacatattagtttataacttgttctttgttccttttctaacatactcctcacaaaataatatcattgatagtttcccatttcaattaaaacagatatcaatataatttatcagcaaaatattttatggatgtgtgtacagttttggttaatccatttaaccaaaatcctcttgatgaacacagagtatttacaacatttttgctctcataacaatgctctgatgaacctcatgcattcatctttgagcttttgaccaattttccttctgtggtaaattcctgaaagtagaattgttgggacaaaagatttagagattttgtatctttaaacatattaccagtttgccaacccaaagggtcatatgagattactttctgcctacagtgtagtaragtgccagcttctcccaacaaccttgccaacgttgggtattgtcaattttttggctctttgccaagctgataggagaatggaatgtctaatggtttttgaattacattctgactgtgctgcatcagactgtaactgaatgcagttgtgatgtatcaggggacctggtttaactcagcacactgtttgaatctgtgtaataactaactatgatataatcaggctttcttgcagttttgaaaaagaagccaaactttcacatggtttaaattactctctcatttacactctccatgtgtgagatcacctgggaagccctttggagatgcccccagtgacccagtacaagttgtcaactgcactccccatgaaagagagattgttctggtccaaaccctatgctctagaggagcatcttggaaacagcactgccctataattgatattgctccattgggtggcctgtggtattcaattcactggaaagtatcaatccctttgccttcagcaataatattttcacagttttgatgtgttttaaaggttattgtctccaggacaggtaattgaggaggcctcacacttcatcagaggccatttcatctttattacacagccacacacaaggcagcattttctcctttcactgatggattatttcaagatttataaggtctggtctacatgaaagcaaacacatgtttgggtacacagtcaaataattcaaagatatagggtcagcaggatcctaatattaaagtcaggacttccagcctgggcaacaaagtgaaatcttgtctctacaaaaaatacaaaaaattagccgggcatggtggctctcgccagtggtcccagctacccgagaagctaaggtgggaggattgcttgagccccaggaagtggaggctgcagtgagccatgttcatgccagtgcactccagtctgggccacaaagcaagaccttgtctcaaaaaatgataataataaataataaaagtcacaactttttcctcttctacctgtgccagagacccactacctaacccacatacacacagacacacacaaacacaccatacacttattcctttcttaaaatgtggctttcaaatatttgctttgcatgcagttttctctgaagatatgaccagtttcaagattatctactctaagttttctgactggttgtcagtcagtcagtttggaaccctgccataacatattttcctcaaattccttgcagatactggaataataatgaatgggaatgttattttgagccgatatttggaaagtccttatttggaattctacaagtttatgtctcctgcccagttcctaagccctctttctagataaccatccagaagataatcatccagcagctatccgggtacattcggctgacttggttagttgggtctaagcagtatatccatgagttctaactcgggtttctcaaactctttttcctttgggtttctcagactcttctctcaaactcaaactgccttctccagtccattgctaaagcttgtatgacctttgctttccctccatttcttgacttgtggcatccactagtcctacattgtaggactagtgtgagcaggtcactcagcctgaaagcactcaccctgggcctctagagctaagttgcctcaacacacttcactatggcttctcagagcacactcaccttgaatgtttagaaaaggtaatctttttggggttcaatgagatcaaaagcacggataccaattttgggatcaggaatcaggaaaatctgggaaatgaagaacgaaatgaggccttaccattttgatacaaagttcatattcaagtgagtcaggagatctggtttaagttccagatctgcctcttactagttttagaatcttgggcaattctaggctggacgtggtggctcacacccataatcccagcaatttgggaggccaaggcaggtgaatgcttgagcccagaagttcaagacatgccttggcaacataggaaggccccatttctacaaaaataaaaattagccaggcatggtggtgcattcctgtaatcccagcaatatggaaggtgggaagatcacttgagtccaagaggtcaaggctgcggtgagctatgatctgccactgcactccagcctgggtgagagtgagatcctctgttaaaacaaaacagaacaaaacaaacaacaaacaaacaaacaaaaaaacaaaaaaaattggagggaatttagttcatatatttgagtctttgtttcctcatctagaagatgtagtaaagataaatgaggtcatatatgattgtccctggcataatattttggtacttattgaaaagcagctattgttttaagtcctttgcatatacatttctatgatttactatatatcagtagcatttctccaacccatcttggctaggcaagcaccactgaatatgaaggaggccaaatagaatgatactatccaagctgcaaagaaacaaacaaaagaaaacatctaaatgcatgcctctttggartggcatttgcatccgttgccaatatccatagaacaaatgccttcaggcaggaagaagttgggataatgtcaatgtttttaatagctgtagtagagtcctatttagaaagcagtaattatctctccatattgattttttacatcccctcaataaatccagaagaaatgtgaagaccatctgtaagtgtgatttttaccaggatcagactctaatttgcaatggctatgtgtctgtttgatttagatcaggggttagcaaactgcagcccacaagccaaaactacctcccccatctatttttataaataaagttttattggaacacacccatcacacccatttctttatatctgtggctgctttcatgctaccatggttgttttatttaattgtaacagagatctaagagatctagagcccatattgcccacagagctgaaaacatatgtacatctaaccctttgcaggaaaaaacttgttaaatcatgattgagattatagtagtattatttctgattgactaggtagtaattggtcccagcatgtaaagtttctaatattaaagtcacacgatagaggagctagaggcttaagaaaagtrtacatgaatttatttatttggaataggaagggaaacatccctggtatcatcatgatggcatatagaggcagggctgagagctagaatacagaatacgtcctttgctagaaacagtttctcgggctgggttagagtgggtagaaactatggatcatcctgccgcaggtccaagtaaacaggatttggcgctctacataatggctataaagaaacataaaggtgatttctccaagtgttatgctaggtgagaaatatttaataagtaagagcaatcagaattggtcccatattgagaaagtctgttttggagcccagactaaatagactgtgcagtgagaaatgaaaggtcaatttaggtaacttcatttagggcaaaatcatgacttaggaaatcatgactagataaatatccagtgaagagcagggagagaagattcatcaatggccgtaggttgctgtgaactacagaactgaaacatcaatgtatgaataaagtgctgtattgatggacagatgtgtgcatttttatgtatatgccataaaaaatctgaatcaatttctatttgaaatagagaaaagctagttcagatgttagaaacttttctgacgcaaaatattgtgtaattcataaacaattccttgtgttttagtttacagtatgtccagaatataggacttgcctactgtaatgtataaaacaaaagaacttcaggttgatttatttgttaagtagtagacattctcctaggatgtttatgtttgtgaagatgataaatggaagaatacatccacagaaaatgtagacacaggcccttctctcccagtctcaacaccacaccctacacacacacaatgccttccttctaaccttgtctatactgtctctgcaacacacaaagcatatgcccaggataagcttctctttcaaccacctatcaggctttcaacatgtggtttgaaaagatagtgacattgctatgctctgacatacaccgtaatgtcagtacagcagaagcaagtggaagattctacttttccgataaagatcagttgctgtttcctgtcttgaagacgaaagttgagcaaaagcaaaggtcatctgtgtttatattaacaatgtaagagttatactacattttcgcaacaacatcaggtcattatttatccacttgtcctttttttttttatcattcctttgaactgcctgcatttgcttatcgtgatatttctcagtctgtaaacagcccgagtagctgttctatttctctaaatagagtcttaggtcattttattatccagaattgtaagtcatcagaatgcacccatctgttgtccttccacatctgggctaactttaactctttaagcccatagaaaaagtagaaaagccattgtgatatgagtttgatacttttttcctaccatactgctttccagcatatggttttccctgaaaaatcacaaggaaatatttacaaatatcttatttttctttggacatggcattaaacgtggtagatcctccatctccacttggctctttctgattttctgttaccctaattatccttcctgcgatcacagctgctcagagcctcttcttaccaatttaaaaaacctctaaagatgtgacggctgcctttccagtggccaacaagcagatttccatagcagaggagctgcgactggggcagagagccaaagacagcttgtgccaacagccttgtcaatatgccaatcatcttgttacagtttattacatgcgtgacttgattttcttgcatgtgcgttttagaggtaacaacatattggtaaacctgttttcaatccttttgattaccttcaatttgatagctccttcagtaatgaagaaaaaaatgggctattgtgtttgaattacatttatcaaatgattctaagattgttctaacgtgtgcgacaggataagctctcttttagtcaccaattggagaaatatgctcagtgtcaaggaaatggagaaatgcctcattatttatgttgactaatgtataaatacaatatgaacaggggcggtttcaaccctgcaaacgttttcttccaagttgctctgtattttagctagactagactagattgttcagtggtcacaaactaccccaaaatcttaacagtttacaacaacggaagtttattttctaaatatataacatccactgagtgttggccagcgttgactgggggttgttctccacatcacgtccctaagggaccaacagtgttggaggagtctctcttctcatattgatgttcaccatggcaaaggcaatgatcacagtgaaccacatgctacattttaagcttctacctggacaccacacaagtcacttccactcccakttcggtggtaaagcaagtcaattcaagtctgacttcagcatctttgggaaatataattccaccccrrgaggggaagcagatatgggtgaaatgtaataaaattcacctctcccataaagtcctagtagcattgttttatttgagtgaattcttttttttttttttcttccttacagatcctctttaaaacatcagcctggaaacagtatctgtagaaatcagttttgttagttctaaagcagggcttcattgttgggatgtgttgtctgccttcgttagcagatttcaatcatagccctaaatggaagacacattttagggctgttgctgctatagaactccaggtctttctgcttaacggtttcacacttacgtgtgaagggaggacacccttggccaaaagaaccaaggctgctcagttagctgctggttgtcctccagcaaattcctagaactaaatacctggtgctgaggtgtcacgactcagcaagtcctagaacctgtgcttatgacagcactctgataattcccggttattgcatcactccctgatggaaacccagcttttatttcagcaaaagtaatggattgttccagacccctgacctcccttgaagatgtctttttgttggatctggccctgtatattttccagttggttcaagacctagagaaatttctacagactctctcataccaggtaggtttttgtttgtttgtttgtttgttttgcttttgggataggacctagtcatattcagtccacattggaaagcataaattagtgtaacatacataagcttgttcattccactccatgtgttaggtttttgttagtgaacactgactgcaaaaataccaaggtatagccttatgcaagccaacatagtcacgttggacattagtgatctgagggtggaagtgaaatgaagtacggttttttttttccaagtcaactaaacgaacaggctgtatgttttacaatatgaattgggttgtgatatacaaagtgtttatccaaagttaccctcctctttgttttttagaatgacaagacccaaatgggagaattaggccagaagcaacaatgccctcaggcttagtgaaattgaccaaagtttgaaggtaagtgttttcagaccctggtttcctaggaccaagtcttggcctcatcaaacataatcacagtctccttttaccactttggcccaaacactatgaagccttttgcccactggctcagcttctcttgccatatactgattattaatgccagtaaaatacctaggcaccttggcagtaacttacgcaaatatgtatatttctaattacagggaaattgttagaacatgacttggattagagatacacagctaataattcaagaagaaataatgctttgttttcagtagaggaaaataaaagcttcatttgaataatttttcctcctttctctccctttttgttttgatacttacgcatgggcaataccgtaaactggcaataaaagaagttatcgcaaacagtgtggccatttctcctcagacactggacatcctacatctgttatatggtttaccatccatccacttccttgctatagctccaggtccacaattctttgtcatgtcattgctcttgacctataccatgactgataaccatgtacatttttaagaaaaaaatgtaaattaattaaaataatttaaaaacacatatccatatggtgtttgtgcatatattttgctttttctaatcttatctttgtagttcaaaaaggttaaacctgaatgtgatatgtgtgtgtatggaaactgaatgcactataggttcaaataggcaaggaagttgcttagtaacatcctgttcttgactgtgctatcataatttgcattttccaataaagtgtgtttccagccttaggacagtgctactattattgctggtggattttgtaatgtaagcttgactcattcagtgtcaagatcacctaaggccaaattcccattccacacgaattctctttcaagggatgtcctacccttcaagatgcccttaagaattctggattccttaaatatagaactatttatgcttactcataaaacagggaatgttataatatttctctgcttcactgtgtccaaggaagtagagaaatctggtaccatatttatgagcagcaataaaccatgtgttttgctttttcctaaaacaagcctggcaaactgtttaagaacacatgtgcagagcttgggcacagggtgagagtttggtggcacggagtgaggctagaggtgggcgtgtggagagtctgatatcctgatatcaaagcaattccattcagacttaggcctgagctgctcccagtcatccaagtcatttttactaatatctgacaacttgcaaatattgtgttacgttcaacactgaaaatgaggactgtgcatttccttttgtytaaatgatgattaaatggtgaagcagctacagaagtattgactaacgacagcatccatttactagaaaatatgtcatttgctactgcaaacatttatggtctgattatacctcatgttacactgcaatggtttgggttttttttttttttttgtatttttggtacatcagaaacacttttcccaatgtttgttagtttaagcattgktcaacatttatttattaagcattgactttataaaataggtaccaggaatatgaaaatgagtaagatatgttccctgacatccagtagctcatagtctagagatgtcaccataataataactagcatttattggacaccacctgtgtctcctgaagcctgttacctcatttaattttgacaaaaccttatgaagtgaatattatcacacaaacacacacatttagagaatgaatgtgaggctcagagaagttaaacacattgcccatgatcacagaaccagttagtggcagagttgggatttaagcccagatctttctgattctagagcgtatgttctatctatgaagctcttaccgattttattttatatcaagtgaactgtgtaatacataaagtcactcaggaaacagtactggatggggattatgatactaggcagtgcttactctagcaaataggtatcagagccctggcataggtcctcacttttgctaggattctgtcctactccacccttgctgataaacgggaagccacacgtcctggtccagcacttattctcaggcctcccagggacactcactctccatcacgtagtctcttccctaagtagtctgtgtttccctctgccttgcgggtaacttcatctgtgtgtaccaaacctgtcacccctcttagtagtcctcaaaagacaagacttcaagggagagttaatattctcagagttcatcagaaatacctgtttccaaggtcaagacccaccttagaaaggaggtcttcatataccctgtctgtgcttattttgtgttttcacaacacaaaatattttaacgatgatttaatttagttgtgtattgatagtctctgtcaatctctcagggttttttttttctgagggaaaaaattacattttgtaattttttaatttagaaacaacagcaataacaacttgagtcggtgacttctgaaccatttttgttctgattatcactgtaaacctaaatgtgtgaacactatcagtagggataatatttaccctatgggactgttaagcaatttaagatgagataagaaatgtcacagggaaaaggtgttactccacacatggtagtcgttattatttattgggttgaagtgttggcctcccaaagggcaatggtgatttaatagaatataagcaactaaatcccaggttaaagcagtgaattcctaattgtagaattttccctgttaaactatcaggtgggaaaggcctgtcaagatgtatatggaaggagtgagatccttgaaataattaatacacctggtataactcccatcattaggtaaacctgggctcatccctactagacagtaatagaaaattagaggataaaaggatagtcacaaaaataaatagaatatattgaaagctaactatgtactaaacagtgttctaggcatattttacatttattaattcatttaaacctctcaactccctataaagtagacattactaattatctcccttttacaaaaaaagaaatctgaacctaagagagtttaaaaaatttgcccaagaccacataatcagaaggaagattttgaatctgatttttcctcacagcaaagtccatgcattttccactttatcacaccggtttttgtttttgtttttgtattattatttttgagacagagtctcattctgtcacccaggctggagttcagtggctctcagctcactgcaacctccgcctcccaggttcaagcgattcttgtttctcaggctccagagtagctgggactacaggtgtgcacttgtattttttagtagagacagggtttccaccatgttgcccaggctggtctcgaactccttttactcaagcaatcctcctgcctcccaaagggctgggattacaggtgtgagccaccgcacccagccaatcacactgtatttaatatcacaacgaagtgcagtctgcccttctcaggatgatcttagatctatttttcagcaagtcgcattcgggtggagcaaaagcttttaaatggtggtcaattacacaatgattaaatttagtttaccattataggtcaaagggaagtgggaagagtttgatgactgtgtatttgtcatgtttctagttatagtgtacaactctgcctgtttatctgagtgagtgccaagaggtgaggtcagggcaggggctcttgcacatggcacatactatctgccccacagctattttgacttggacagtcattgtgctgggtggtaaaaattccagtgggctgggtaggacatactggggccctgtttcctctcatctgtgtttgagaactaggcagcattgcatcaaatggaaggaacaagtgatgagacatcaggaaaatatcagaatgaaagagaaatgcaaggctctaaaggaagttccaactcacttcgacaccctccagttagcaaagaggtgacagaatcccaaaagggcaggggagagattatggatagcaggctcctggaggaaaaactaggtatgtccagtagcagatctgtggaaactattagaaaccgagctaattgtggacttcttagcatgcctcaggaaatgggaaggaacttttcccttttgggcttgtattttttccaattttccttgttcgggaaataattaattctttaagcaatgtaacctcctgctgtgatttctcaattccacaaaagagaataattatagattaataatggaccaaaatagaaaaagctaaatgtgtgtagcagataagtaggaaatgttctgtcttgtaaagggtattgtttcggtgcccggcaacacagaaacaattctcatctatgcagctctaaatggatgttagaattcacccctctttcctactggtataaaattttcagtctcagtaggactaacgctttgacacatcctaaacctcaccaggagtaggaaatatttctcatagcataaatattttttcttccttgaactgaaaggtttgtggccttccccatgcatgataactgggcagttttcagaatatacctcacagtaaaacttagacttcacacctgtaatcccagtactttgggaggccttggtgggcggatcctgaggtcaggagatcaagactatcctggccaacatggtgaaaccccatctctactaaaaatacaaaaattagctgggcgtggtggcacgtgcctgtaatcccagctacttgggaggctaaggcaggagaatcacttgaaccagggagtcagagtttgcagtgagccaagatcacaccactgcaccccagcctggcgacagaatgagactccatctcaaaataaaataaaataaaataaaataaaataaaataaaataaaaaacttagacttcaagttttaactattgaaaaacttccatgaattgggtacagtaccgagctaaacgttgtatatatgttatttattcaggaaatattttcaggtactatgctgagtgctaaaagcattgttctgccttttaatactaacaatgcctgtgaaaaatatgtaggattatccagactttataaatttaaaacattaggattcagaaaagtaatatgcacatgctcctatactttacatgtgacagactggaatcaaatggtttaggatgccccgaataactgaactcttaatgccccagaagcccagatcgggacccaccactgggagttacagccctctggagccagcttcagaggtgcacaggtttattctcttccctattcaccagtgaaagaagcccagagcctccattccaggcactctgtgcttcccaaagtaacaattacttaatttgacaagataatttaaagagattgccaaaataacttacaggagattgccagtataatcagccctcccatatctggggattctacatttccagattcaaccagttgaagagagaaaatatttgaaaaaaaaaatttaaaataatacaaataaaaacaatacaacatagtatttatatcatattgggtattgtaagtaatgtagagaccatgtaaagtatatggaaggatgtgcataggttatatgcaaatatgctattttatgtcagggagttgagcatctgcagattttgatatggaggcaggggtcctggaaccaacatcccatggatacctgagggacaaatgtaatcaccatgttttcccaggtggatttttaacagtggccttctggagacactatgcctatggtttagtctaattgttaaaaattgggataggtgaagaaagatggcagataggcacaatgggaggcagatatttccataaatgccttttaaatcagatcctttctagattcacttttggctctggatctggaagctatcatcatggcaaccccagagtcccattggtttgcctattggttaggtgggccaaggtgtccacatatcacaaaagagttctcaaaaaatttcttcccaataacgagggagatttatatttaagagcacctttagccaaactgaaggaagggaaagttcacaaatatggtaatagctcaagtcaatgaattagaggctttgtgtagggtaattgttgagacctccccagttgactgaccaaaacaattctttgttggctagcagagttagagaatagaattttgcataatccaagtatttcatataggtcccttctgctgttactggagcactagtgagctattgtatttgtggtcataatattagctgcataggtagttctataaatgtgtctggttaataatccacaaacgtcagtgttttacatttgtaagtaaagaagtctctgtccacagcaaaaacgttaccaggcaatattttttagcattaaaaatataaaataaaatcaagttacttcaaagttctaaagaactagaagtcaataaaattcataaatatttatttttcaataattctggatgtatcttaggatcctaatataggatgtacatcctaatatagttatgtttacctgtcatttattttaattgatatatgccagtacttctatagtaagattttattggtaaaatgttttttattcttcaaaatgcagattcctttcatagggtatattcatctaccattttccattctttgaaatctgaaataagtcctaaccttatacattcaccaggagtgtgtattaatcacttctcacactgctgataaagacatacctgagactgggtaatttataaagaaaaagaggtttaatgaactcacagttccacatggctgggaagacctcacaagcatggtggnaaagtgacaggcacatcttacatggcascaggcaagagagaatgagagcaaagcaaaagggaaaacaccttataaagccatcagatctagtgagacttattcactaccacgagtattgtgttgagggaaaccacccccatgattcaactgtcttccaccaggtccytcctacaacacatgggaattatgggagctacaattcaagatgagattcagatgggaacacagccaaaccatatcagagtgtatactttcattttattcctcaatcttcattccttaagttttcaacaaataatttgcttttgaaaggattaggagcttaagttggctttatagttatccagtaaccttttgatttctccaaccaatgatttgtaaaggaatcttcagattcagatttatcctttcctacttcatcttcaattgctaaattaagcatgagtcccatcactgagataacagtctttcttggacagagttatgccaggtctttttctatgtaaagcagtcatctattaggctgtcgttggtctgtcaagatgaaactgtgtgcattggatccatgtgaatgaacatagaacattatacaaatattgtatgtttctattctttgcttgaagcttctggttacttagatcttatagtgcttcatagtataaaaaatggttaaaatacttaaaagttttaaagataaagatgtcagtgtcacagtgcataactgggttttacatggtcaagtatacacacatacacacacacacacacacacacaatttaaaaaatctctgatgcactatgccatactcagcaccaatccccattacaactctcccaatgtttcctggccaggcaggtcaccaagatgtttgggactgtttatgcctttgcacctactcatcataatattgtgtggggatcaatgggagagatatttggcccatttttaagccatatcaggggatcttccacttcctaaactcacttagacttggaatttaagtctagactattttgtttttaaccttgctaacacctacctacctacctacctattcattgtccatagcctaggtagtcttgaaaaaccctccattcccgcagcttcccccaatgcctcctctgaactcagtgtcactcctgtgtgcctcctttagtgttttttttgtttgtttgtttttgtttgtttgtttgtttttgtcattgcactcaccaccttatattgtaaaagtctattactaaggaagtattcctccctcctttatgtgcagaattccttgacagaaaggataggtcatgtttacctctgtcttgcctccaatgcgcagcatgaagcctggctctatgatcagctctaaagaaatgcttgttgatgggcaaataaactcgagaatctcacaccagagccagaccggaagtttccttcatttcatgactggttttcacaaaaacaagcattagggagagtggaaggaagagcttgcaaaataccttactactgcattatgaatgtggagttgtaattttgaggttcttatccatgaagatggtccttaaaattcagaattttaattaccaacataacaccatcctttcttactagtatcattattttatactatgttttcagtaggacatatctgatggaaatacatttcttttgatattatttattataactggtgagctacattccacccaatagtaaatgcctctcagcaaaaagatagatacttttgatagttaatatattcagatattatgttgtttgtggaaaccataacttaataaattttaaaacagtgtcttctttaaaartaattttttattaaactttgtattttgaggtaattgtagattcacatgcagctataagaaataatgcaaacaatactttttacccagtttcctccaatggtgacatcttgaaaactatcgcacaatagcacaactttgatattgacactgatacaatcaagatacagaacattttcatccaggcatcccctgtgcttagcccttttgtagctacgtctacttcctttgcccaccctcaccttaaaaccctgscaataattaacattttgtcatttcaagcatgttatataaatggaaccatagagtatataactttcaggtattggttttttccaatcagcataattctttggagattctttacttagcatacttctctggagatttatctaggtgcttgtgtactagtagttcattctttgttatcgctgcatagtatttcatgctagggatgttgagccatttacccattgaaagatacttgggttgtttctagtttggggagattataaataaagctgctataaatactcatacacagatttttgtgtaaacatacattttcatttctctgagataaatgcctaggaatgagtgtgatttctagatctgatagtaattgcatgtttagtgtttttaagaaaccaacaaaatattttccaaaattagatgtgccattttatattcctaccagcaatgtgacagcaattgtttttctgtatcttcaccagcatttggtggtgttactttttttattttagccattatgatcagtgcatagtgatagctcattttggttttactttgcatttctttagtggctaatgatgttgaacatcttttcataggcttatttgcatctgtatatcttctttagtgaaatgcttctctgttcctgttgcctattttctaattagattgttttttgactgttgagttttaagagttctgtatatattcttgatagcagtcctttgtcggatatgtgatttacaaatattttctcccagtccatagcttgtcttttttattctctttactgtttttttccacaaggcaagagcttttaattttgataaaaataactttttatacttaattggcaaccaaatacctaaatgtcttttgatagaaaaacttgtcctagataatgtaaaatcattttacatattcacagatccatctccactaatgtcatataagtttaaaaatcacaaagtaatttgaacagattcctaaattataaatyagttaacagttattttttgctctaatctttagttgtacatttacttcaaataaacatttgttaaaaacgtactctgtactgaggaatgaggatacaaaactcataatttgtcatttctttgcttcagggacttacattttactggattacatctaaatttttatttggcagttttattccaggaagatcatgacagtcttgttttctaaatcttaactgccttttgatgaaaaagaaagataaggctttaatttctctagtgaaacctgaagaagtaaaataaaataacttgtatgtcccttcacaagccacagtcagaacactgtcacaatctcgacctttgctccccaaaccctattttgcaaaccagatgctatttctttggacattacaggctattttcaaaatacatcagaacttaacaaaacatcatattagctaaatagcactataagaaactgcttataatattaaaattatgtcttgagtttataattatataaaaattgaatctaccctagagcaaaaattacaattaactactaaaaaatcgaataagtgatttttttttttttttttgaggcagggtctcactctatggcccaggctggagtacagtggtgtgatcatggcttactgcagccttgatcttctgggctcaagcaatcctcatcctcccacctcaacccctccagtagctgggaccacaggtgcaccccaccacacctggtatattagtttattttcacattgctgtaaagaactacctgagcatgtgtaatttattaggaaagcaggttaaattgattcagagttcctcctggctggggaggcctcaggaaacttacaatcatggcggaagacaaacaggatgcaaaacacctcttacaaggtggcaggagagagagagagtgagaggggaactgtcacacacttttaaaccatcagatctcgagataactcactgtcatgataatagcaagggggaagtctgcccccatcattcaatcatctcccaccaggcacctcccctgacatgtggggactacaattctagatgaggtttggttgtggacacagagtcaaaccatagcacccggctaattttcttttcttttctttttggtagatatggagtgtcactatgttttgtttccctagctggtcttgaactcctgggctcaagtgatctgcccacctcggcctcccaaaatgctgggattacaggtgtgagccagtacacccagccaagaagtgatttgtataatggcaggattatgaatgattatttctgtgtctttaatttgatcatatttttaaaacagtcattatttttggtcatcatgctatatactacagagagcagtttttaatctgtgaacgtgtaagtcaacttgatttagctgaacatagcagagtcatcaatcaaactgattgatgactaagggtccgcagggtaacacatcatcatagttgtttccatggtgatgaattatgatgtcacaaactcatcaagactgtgactcagtgaaccatctagacagaggatgaaatgcagtagttcaccaacatgtatgccatctttgtattatatggtattattaattaaaacgaagggctgagtatttctttcattgagattacatgaagatattacgtatattcagacttgcctgaacacggctatgctggttttaaattgaaggttttcacaaagcaaaaaattgagaaacagaatttgacatagaattgtgtatttattagaaaagatcttttcttctcatattctgaaaagcacactcattaattacagttaaattcaggcaaatttggcaaattttcgtcagtatacttattcttttgttagttaatagctttgcttttcagttttagatattggtattaaatatataaagagaaaagaccttagtgttctcatgctcagagattaagagaatagttataggtttgaaattaggcactttccctgatagtttttgttggtacatgttttaggttatgtttctatgaacaaccagatgcaaacgtcctggcattcatcctgcctgcttgctgtttgtaccatctccgtggtagcaaccatccaagctgctggaagcacagactgagctctatgagtcaattattttatatacctgggaacgtgctagccttcctgtcactctttgatgtcactatgtagacagtttgcagcctaggcaacatggtaagaccctgtctccaaaacttccaaaaattagccaccaggtgtggtggtgcatgcctgtagtcctagctactctgaaggttgaggcaaaaggaaccctcaaccccaggagtttgaggctgcagtgagctatgatcgcaccactgcactccagtctgggagacatagtgagatgctgtctttaaaataataataataattttaaaaattaaaaaatatctagacaatttctctgctttcaagactcttcaaagatctcaaagagaagctttactctggagtctcaacagaggccattcaaaaactcaacctggtttttcaacaataaattagaaatgtaatgctaacagtaggtgccaaggccgaacatcagggaaaagacattagtgaccttgagttctagactagattttaccagtttctgaccttcaactctggtactcgattttctcataaatgtgagaaaatatcttaaccgtatcacagaattgatgtgagaattcaaaataaagcatatttaaagctcctaggttagtgcttcatttatgaaggtcagtgcttcataaatgatagttatttttttccattcaaaatagagataaaaaagactttatctcactaatgtgtcatgcaaataaggattaatcctgttttctattcctgaagcatacagaatgtgatttctttctccatcatttccatctgactatcatctgggagaacacacagctgctccacatctggtgcaacacaggcagatgtagctgtccagagggagaagagtgtttgcttttctccacctaaacactgaccctcttctgcttagattcaaagactgtcttccttctgcaggtttacctgagcctggactcaaagaattaccttcattatgagctaaaggaagtcaggcccattcttcttctgcctggcccctctggctctttggcacttcccacatcctcctcatttggaaaggcttcatgactttctggttcacaaagcagctctgttgttgcttatttccactacagggaaaaagtgaaacacttcactcagggcgcagaacaatggaagtccctggaaggaaaggcttgcaagagaaaaccaagtggcttctgagatattcgaaagtccagttgttttccctttttaaaaattttcagatgctctttgatgccatttcataaagcctgtgattgggccaaaagtcttagttcaccatgtaccacaaatagtgtactctatatagcatatgcttaactaagaaaaaataaagatttagaaatagatgtattgaggacatgccattaaaagcagcttccattgaatcaactgtttttcagagtactgtcaagattaccttaaactagtctaatcaaggtaggtggtggattccaaacttgggaaaaagtgagtctttgtattctgtgaagtttaataactacccaaggaagaagtgttggatacaacaactatgagtatcttagaaagtatgtcttttttttttttctgagtcagggtcttgctctatcacccaggctggagtgcagtgatgtgattataactcattgcattgcaatcttgaccccctgggctcaagccatccttccatcttagcctcccaagtagctaggactacaagtggatgccaccatgcccagctaatttttttcttaatttcatttttgtagagataggatttcccaggctggtatcaaactctcaaacttcctggtctcaagcagttctcccaccttggcttcccaaagtgctggcattataggcatgagccaccacacccagcctgggtgtctgtctttatgctaaatgtccgagcctttccatttgtcttttgcctcttcataaacctctgctgagctttatcaggtcattcacatctttcattacaggcaagtggtaaacttagtaatatgcttcctctggtgacaatgggcaaaggactagaagcataagtaaagaaatagtagactgaaataagcggattttgacatgcaaaaagatgcagcaaggtgaacctggttaagaaatagactcagagagcttgaacatggaaggatgctaggacaagtggcagctaaggcagaaagacagccatggttccagatgtctggggaaacaatggaaggcagatattacaaagttttccattttgtaccagaagtgtccgtatgaacacaaactcctagtaagtgttcttaattgttctgtgggctgatgtgcatttttctcctacaataggaactagcaatctacatattatttaccaagccttcctagatagaagcatttatgattattttttgtttatataaatgtcttgcatttactagaaaatcatgcttttcgagaacgcatttctattatggagtttcttaaagagagaaaaaaaaaatgtatggctttagaaaaatcctagtgattttttgacagtatgaactgtattgtgtgttcttgtcttggatcaatatcatggcacaatgctttgatagtgtctgaagattaagatatacaatacaatttcctcccttcccttctttcctttttccttccttcctttttcctttctttcttttccttccttccttcctttctttttctttctctctctctttctcttccctccctccctccctctctctttcctctttctttctgtctgtctgtctgtctgtctttttcttgagatagggtctcactttgtcacccaggcagaagggcagtggccctatcatatttcactgccacctcaaattcctgggctcaagggatcctcccgcctcagcctctcaagcagctgggactacaggtgtgcccctccatgtgcggttaattgtagttttttgtttggggtggttttgtttgtttgtttgtttttgtagagactttgttgcctaggctggtctcaaactcctgggctcaagcagtcctcccactgcaacctcccaaagtgctgggattataggtgtgagccaccatgtccagcccaataccattttcttatgtttcccatatatgcataattttacttgcatgcaattctgaatggatgaaacatgttttaatcacctatttttctactttgtagaagagccaaggtaacatgaactaaatcattaaagcagttgacttgttagtggattgtgataggactcaggcatttcccaaagggggaacccatattttggtaatcccagacattttaattatatttttctatccattcctcaatgccacaatgaggaacagcattctttcctgggaagtctcacaattttgtcaaaagtagaagagttgcctttgacgaatacaaatccagcaataaagaagaacaggtctaacaaatgaggccaccttggaaaatgtcattttgcccctttgagccttgcccatcttacctttagaggaagagatgggactgaatcagttcaaagagcctcgatagctttaaatgtctgtgattgatttttctgcagagcaagatcaaacaaaacagtatttcctagctgctgcccttacatgtagtggtgattcacagagaatttggggaggaaagtagccattatgggatgttttgcaaaaggcaataccaagattgatcatcacctgagggcgayacactatagttgttcctctgtatccatgacagattagtcccaggaccccttgcagataccaaaatccacagatgctcatgtcctgcttataaaatggcatagtatttgtacacagccttgtatatcctcctgaatactttaaatcatctctagattacttataatacctagagttgtataaatgctatagaaagtattgttatactgtatttttaaatgtacattagttttattttttttccgaatacctttttatccatggttggttgaatccacggatgcagaacccatggatatggagagctgactgtaatagtcaaagacaagagtggctggtggtaagcacactatctgtccacaagtgaatttcccctaagaatcctgctggtacatttcttcatttcttgagattattgaaccacgtgatttgcctcactgcttatttcaccttctgggtgacatgggctgtgaatgtgcagttcaaggcctaaatattagccctgattcaaaatggacattaaccaaaaaaacaaacaacaatgatactggccaactgacttctctcacttctctcttctcttttctttaattcattccttacctatttagaatagctgaggctcatttttatcttcttatgacagccagaattgtcatctattaagattaagtaaggaaggcataattgatattcacaaaccaccccaggatttatcagaagtgagggwgtttcatatggattactaattgtctaaaatttggctctaagcacctgaagatcactaggcaggagagaagagtagggtttgttgtacatgagaagaggctgtggggtgggggatgttcaccgagaagactgctttggtctttgatactagcatttttccttctatatggttaacaaggcacatattttcatttttatatccccagaataaaggcttgaaaggaaacaaaatctcaaataaatggactaatttgttaaattctggactaaacctcagtttattttaacagctttaacaackgtctctggagctcataacacatatagagcactattggtgtcacacaaaaccttgaaatcagaattgccacagaccgaatctgatctgaaatggcatttcattcaactgcagctttgtgtcacaagaacctgtctctgttttcctaacatgggtatgatgcatattcagaagcagccgagtgatttacttcttttttcattacgcttgtggatttgcatagattcagaaggggcatcttctgggaggtataagagtttatagaaagactaatttcttgactaggcacgatggctcatgcttgtaatctcagcactttgggaggccaaggtgggaagatcacttgagaccaggagtttgagaccagcctggccaatatggtgaaaccctgtctctacaaaaaatacaaaaattagctgggcgtggtggtacatgcctgtaatcccagctactcaggaagctaaggcacaataattgcttgaaccagagaagtggagattgcagtgagccaagattgtgcccctgcactccaacctgggcaacagagtgagactctgtctcaaaaacaaaaaaaaaaaaggaagattgatttcctgtagacagaaggagtgtttatattggcagcagcaatgcagtatcaaaactttggggtcaccctcttgaatatcttatttgtatttcttcttgggttactaaagtcttgaggagaaaaatgaataaaaggcttaagaggattctcatttccatgcaaagcttctccacactcctgagagaaggttagggtcaggaaggaaggtcagacaatataaacctcagcactattcagtaaaatagccatggggaaaaatatggtaagtttgtcttaattcatacccaaggacatttagcgctcagaaaactaaaatactttttatttatttatttatttatttatttatttatttatttattttgagacagagtcttgcactattgtgcgggctggagtgcagtggcgcagtctcagctcactgcaacctccacttgaacctccaggttcaagtgattctccttgcctcagcctcccacgtagctgggattacaggcgcccaccaccacacccggctaattttttttttgtatttttagtagagacggggtttcactatgttggccaggctggtcttgaactcctgacctcgtgatccacctgcatcggcctcccaaagtgctgggattataggcataagccaccttgcttggccctaaaatacttttaataagattgtctcatccttctcttggttttccaatggaaatggtggtatagcaagtccatctgaaacacttctgcaaaataacaatgaagctaatcacygtgggaaacatttacatcatatgtatttgcatacagaggaaattgataatcttgagacatcagcatactagaatagcaagagacatgttttattctattatattctcttagtcagcaatktttaattgttgcttaaaggaaactgaataaaacgtgggcgcagtggctcycacctctaatcccagcactttgggaagttgaggagagaggatcgcttcagcccaagagtttgagaccagcataggcaacatagtgagaccccatctctacaaaaaatattttttaaaattagtcgagcatggcggtggctccctgtagttccagctacatggagggctgaggtgggaggatcacttgaaccagggaggtcaaggctgcaccctggcctgggcaacaaagccaaaccctgtgtcaaaaaaaaaaaaaaaatacgtaaagcaacagtttttctataacggattgcatggtaaaaggaaggatgactttcttactataactccttatgataattttttccaaagtgttaatcttaggggttgaaatttttataggtaatcattaactttagtagaacattattttaaagtttaggtatttcatctgagtatattactctggctttcctaagctagcttagttatatatgttcacttcagtttgagtctccactaaattttaacatgaacaaaatattatatgcaacaccatagaagcaattgttaaatcattgttacttttaatatcacctaaatctaacctaagtaaatgygtttatttttattaccaactgatgtagatatacccacatggacagaaaacagcataaaccaccaaaaggacttgaaaattccctcttcaagacttcttttgccaatgactaatgtttaatgctatttgctagagattctggtgccaggaggatttctaaccaggttattttatcaataggaataaaatatcgagggcttaaattagtgtaatctctcaagatcttgaatttgacrttttcataatttttacttaatcatagctcctggggattggaattactcttttagctggcccgagtctgggaggaggatccaaagtctttgagttgttttcttttatttctttttagcccctaaagcactggaaatggttggccctgaagtgctcctaaggtaaccgcaagatgaggcaaaacaggattgagatgaaaaccaagctcacccacatcctacgtcaattagctatttttttttctgtgtaaacaatgggagggaggtggattgtagcttttatggtagaggttcctcggcacctcctgacgcccccaggggtcccccctgccactgccctcagcccaaatataagctgacaacaaaatgtttcttcaaagtgctcattgtttactctattctggcttcttcttaaaggtcatcatcatgttgaattatcttgagaaaatcctctgaagtgtatgtgtgtgtgtgtgtttaggaaggatgtgaggaggattgggaggtgagtctctgaataacaagttgaaaaaagagtatggaggaaagcggtgtttaaaattgtccaaagccatcggccgggcatgatggctcacgcctctaatcccaacgatttgagaggctgaggtgggaaaattgcttgagcccaggagtttgagaccagtctgggcaacatggtgaaaccccatctctacaaaaaaagtacaacaattagctgggcatggtggtgcatgcctgcagtcccagatactcaggaggctgagatgggaggatcacttgagcctaggagtttagggctgcaatgagatgtgagtgcaccaccatactctagcctgggcaacagagcaagaccttgtctcaaataataataataatatataaataaacaaataaataaaattatcctaagtgaaatcagttgttgatagaactgaagtacatcaagcctagtgggactgtggttgtctctccagcctaaaaaaaaaaaagaacaaaaacaacaacaaaaaaacttaactccaaaattgctgytgctccatttatttcaggtgtaagacttctttgagatttaaaaacaatataatcatttacaatgtactttgttggacctaagcataggaaaattcattcattcattcattcattgagtacctgttatatgccaggcaatgcactaggcaccatcaaagatgaataagctatgtgctaaaattcacagtctaacagaagaaacatgaaagcagagtggaaatatactgtggcaatacatatttggatatactggtattaaaaagtaaggatgtttcagctaaatcttttttggtgtttattttttaaaaattcatctattaacttcctacacaccatgcatatattcagctaaatcttaaagtatgagaagaaacatgccattcatgaaagggaagagggagccagtgcatcagatacaacctatgcaatcgtgaagatttatggcagagcacaggatatttggggattggcaggcatttcaaaatggctggcacataaagttccgggatgggaacaggctggcaagagaagagatcatcggagccaaagtaactgaactgtgattgaattttagatatgataatatctataggaaacctggcaacccggtgggcaggtaaatatgatagagcgaagatagaatcttcaggccttcaggggactaagcaggaatagaataattttattgagcactttaagtggacattatgctagattattttacatatttcatctcctttaatttacaccacaaccctgtgagtgcaggttgataaagaattaaataaaatccaggtgaagtagcagcacctatagttccagctacttgggaggctgaggtgagaccattacttgaggccaagagttccaggctgtagttcacaatggttgtgtctgtgaatagccactgcactcctgcctgggtgacacagtgagacctcatttctaaaaaagaaaaaaaaaattgagacagggtctcgctctgccacccaggctggagtacagtcacgcaattacagcttactgcagccttaacccccaggctcaaacaatcctcccacctcagcctcccaaatagcttggactacaggtacatgtcaccacacctggctattttttgtattttttgtagagatggagtttcaccatgttgcccaggctggtcttgaactcctaggctcaaatgatcctcctgcttccaccttccaaagcgctgagattatagacgtgaaccactgcacctggtctagaaattatttaataataaaaaaatgaagacagaattcaatgaagagcrtagaagagtctcttaaacctytgttttaagctatgagccaggaaagagatggtggcaagggtgagatggttgcagtgcttttttgttcacttatctcaggcctgtgtgttctgagttaaagacaagtcagttggcaagagaaggagagaggaagcttcccagaaccatttgaaggaaaatttggaaagtcttctctaagggagttgccctcaactaccttttaacacaaatggaggactgaaaaacaaaacaaaacaaaacaaacaggaaggaattgcagatatacagatctttggcctttcaaactatggtatctcttagtactattttatatattgataataattataatttttctcaaacttcccaaaagtggaacattgtgggaaataatatgggagtggacatttgaatttctgtttgactttgcagcagaaatctcttttctaactctctctttcaatctcaccatcagagccatctgattgcttgataacatgattctttttgcccagcccttgttatcctccctcctgccctagtmaccatgacataggctccactcatttctacctaggaacctggatgcactgctttgcactattgcctcctggcaaaacagggcaatgagaaaggaaatggaagcccaaattcagagccctccttcccagcacaagaatgaggagatgccctttttccccggggagggggattcttccctctctcttcagtaattgtctttatcactgtcatgttctagccagtctttattatccccgccacacaaatttcatgttcttctggcagtcaaatcaggaaattcaaggacacaactgctctggcttcgtaaagatggggatcaaattgtttgagttgctgatagcaactctttgcttcttgattctccatgcctcctcaagcttttttggctgaacttttagccttggaacagggtcactggaaaatacttcttaatatccttaaattctaattctaatatttgccttgtttcattttgtttatttggggaggataaagtttaggtgttcacctatcaaactcacttccttcttttttttagacaaggtcttgctctgtcgcccaggctacagtgcagtggtatgatgttggctcactgcagcctccacctcccaggttcaagtgattctcccacctcagcctcccatgtagcagggatcacaggctcgtgctaccacgccccactacttttttgtattttttggtagagacggagtttcatcatgttggccaggctgatcttgaactcctgacctcaagtgatctgcctgcctcgacctcccaaagtgctgggattgcaggtgtgagccaccgtgcccagccctaacttccttctgatcaagtcattctcaaaaataaacatttaattgactgtcaactacaatgataataagacaatgtttgccttaaatgagctctaaatctagttgaagggataacacatggaatggactggtaataaaaagtgggctttgcttggtgctacagttgtgatgtgaactaaagagggagtgttttggactgactttgagttggggaggctttatggaggaggtgacttttcagttgggccttacgttgtattttatgaaataaaaaaagaggaaagacagtccaagatgagaagacagtataaataaagggacagaggcatggaagggaatttcttggccaaaggatagtaaaaagtacagaaccactaaagtctagagcacataggctagaggctagaataagtgagaaatagctaatcctaggaagataaattggggcttaattgtaaaaacctttgcatgctatactaagaagctttgagttcattctcttggcaactatgagccattacatgtttcaaaagatagatctgatggaaaaacagaagtatagagggtaggtaatattctaatgtgtaaacttctactgtgagtccaaaagaatatggtatctatctctgaaccatgttcaatattttgcttagactgttcgaactatgtaagaataagaaatactaaagtgttttttctctgatataatatttaaataccttttagctatcaattccttctaatttccctttaataagacatttactacaaatagacatcattcccatagcaatcttttcttgagacaaagaggtcagtaggccaggttctgcatagaatataagctatttttccattttagaatgccactctccattgatgtctactctcgttaagtagaaaattccaagaagtactaacaaaattatgttaatttgtgtatgtactgacttccagacatttggaaccagattctgaacctgtaactcatttaaatcttgccgtgactttggtttcccaagttctaggtctttctctgaaaatttaaaatgcttctggaaagatattttccatgacacttttgccttaggaaaaaaatttttggtcaacattggaagaaaaaaaaactgagacaacatatatcttgctccttaacatattctgtatgaaattaaggtcttattgacaatctacgtatcagagcctcgtacacaggagctattgaaatgatgtgtcagttcagaaaatcatgttcattatttctgattctcatcataaacaagcagtaaatcaccgtataaggggtgtatgcattagggcctcccacataaacttcacctctgcgtgtgtaaacattttcttattatcgcaaataatcaacaggagaagagcaaatgcaagtttagcttttctccagaatgtttatcatggttactttaaactgtttataggaaagagtgaactataaatgtctttcaggaggtgggtaggaccatatggctcagaggcttttctgcagtaaaatgtttggttaaattttaggcaacagacagtccttccacagcaattatttgtgatttcgagcatcgttgttgatactcaactcctgaaacaaataacaccgacctaaaacatttataataactgaagaaaccaggttccttttaaccctgctaggatccagctgcccccttgcaacccatccccagtcagctgcagctcaggcaagcccagcctttccatccctgcacatcagactgtggtgcagagaaactccctgtgttcttcaaaacaaacattggatgtaatccacctcaatcttttccatggtgaggctttacaaattttagttttctctaagaagatagcctgtatattcaattgcctgggtaaaagtttaatttctgatgcgtaaagcatatcctgccttgaaaaatatctcaggaaaaataaaggccacaacagtttcatgtgtgcctatatcaggattgctgctgagtaagttgtgaaatgtttttggatttctgagccatttggatttcagaattgtggaggaattctggatctgtattttattgtgtattaccaattattttcctttctcttttatgtgacgggtagtattttgattatttaaaatcatctttgtagaaaaattattggcagctatgaatttcatttcaagatatttaagatgccttagaaacttttctaaaaacagtataataggattgagaaccactcatgtatggcctttactgtttcgaggtttttcttttttgacatgtattatttgatgaaaccctatgagattaggtctttacttccgaaagaagaaaaccaaattcaagggcaattaaaaacttgtcaaatgtctcaattttagtaagaaaaaaaaccgacattggcctagatcttaatctgtgcccagtcctcttcccatccctctttttttttttttttttttttttttggkgggctgctctcaaatttttgggctcaaatgaacctcctaccttggcctcccaacgtgctgagattacaggcatgagccaccgtgcctggccagctaaggttaatttagtattgaaraaatatttttgttatgaatttagtgtagccaagtgtgcagtgtttaraccatctacagtaatgcacattaatggcctaggccttcacattcactcaccactcactcactgactcacccagagcaatgtctagtcctgcaagctccattcatgggaaaggcctcacacatgtataacatttttttgtcttttattctgtatttttctatgtttagataagtttagatgtataaatacttatccttgtattacggttctctagtgctcagtacagtgacttgctgtacaggtttgtagcctaggaacgataggttataccatatagccaaggtgtgtagtaagctgtaccatcttggttcgtgtaaggacattcagtgatgaaattgcctactgacacatttctcagaaggtacccccatcgttaagcaaccattactgtattagaaagcagaaaaacaaattcagctccggacttagcctacccatatagcatcattggccagaagaaaatcactttgctttatgaatcccagttttctgcgggaatgaaatgaggtaccatacgtgatcctaccagcataacacctgccaaatagtgcacattcaatactaaaccatcctttttatgcctataaataaaggatttgtactatatcaagagcttctctatgtctgaagttacaatagagtaattccaaattatctttcatggaatcaaatccctgatgatcccttgattttctgagttctgtgaatttcatcacagcccaatttgacccattactgctaattcagtgtttttattagtaaattatatttccaagttgaatcaaaacaacagtatagcaggcacagcttaagacacaagataaataagttgttgcattcaccagtcaaaatatttttaaaaaatcaagaagcaatcactgaatagttttccttgatttagataccaattaggtttaatgaccaaatgagactgataatcagagctgaggaactcaatcaacaggattgcaacatgctttttttaaacctcttgaaagatcacatcactacagaataaggaaacctatttatttatttaatttgagacagtctctctctgtcacccaagctggagtgcagtggaatgatctcagctcactgcggcctccaccccagttcaagcaatttcatgctcagcctctgaatgtaagctgggactacaggggcacaccaccacgcccagctaatttttttgtatttttagcagagacaggttttcaccatggtggccacgatggtctggaactcttgacttcaagtgatctacccacttggtctcctgagggaaatctatttatgactaatgctgttctttttactaattgtttcattggctgtcagcccttagaggaaaaactgttcaaacaaccttttattcatagacccatgttatttaattttagaattatttcccatgtatgcacaaccgaattttcattttcataacaagaaaacaaattctttaagtgagaaacagtacattttacacccttccttttcacaaaaatctcacagtattttctgacttatggtcttgataattagcactcctgtttgctcgtgttctctttctttcacaagcaatgtgatcttatttttaaaaaggacctgagacaagtagacaattgacccttgaacaacacagatttgaaaagttttggtccacctatacacggattttctcccacctctgccacccatgagagagcaagaccaagccctcctccataccctactccatctgaagatgaccagggtaaagacctttatggggattcacttccacttaattattagtaaatatcttttctcttccttatgattttctcaataagtttcctttatctagcttactttactgtaagaatacggtatagactacatataacacacaaactatgcattatcaactatttatgctgctggtaaggcttctagtcaacagtaggttattaatagctaaattctgggggagtcaaaaggtatatgcagattttcacgggtggttggacccccccagcatccatgttgttcaagggtcaactgtatatcctaattgttatttgacactggaagaaattagatctcctggccgggcgtagactcacgtctatcatcccagcactttgggaggccgaggagggtggatcacctgagatcatgagttcgagaccagcctggccaacatggtgaaaccccaactctactaaaaatacaaaaattagctgggcgtggtggtgggtgcctgtagtcccagctactcaagaggttgaggcaggagaatcacttgaaccctggaggcagagattgcagtgagatgagattgtgccattgcactccagcctaagtgacggagtgagactttctcaaaaaaataaataaataaataaataaattatatctcctcttagaagtttgtccctctcttcaactgaaatctatcacagttcgacctacatggtagttgcattgatctgtccatcctggtgccacatatagaacatctactttgtcagatactgttccacatacagtaagcagaacacatgatcccagtccacatgaaggatggtgtccagtcatgtatggcctgattcttttctgtaaagtgctttcacatttgtagttggttcctttcctagagcactcctgtttttgcattcttgtagaaagcaaattatttccaccctgtcactgatttttttctccaattcaaacaatacgaactagaaaagagaactcccttgtaatataaaaggaaatagaaatccctatgtattcaatgtttttaaagtttaatatgattcctcttagcaataaccagcaaaaagaaaatgtttctactttaatcttttcttttgaactgaagtgttcctctatgtcatttacatgacaattggcccaaatctctctgttaccaggacttggtattcaaagtaagaggcttcattaaatttcaagaggacttttttggggaaagtttttgtttgttttgttgtgttttatcataacaaaacaaggcatagtgaccaggaagatggagtttctagttagtgcatacatatacatgcttatggttacttaatgtgatagaagcaaattattcagatgcctcttctccacagaaggttttggtcttcagcacgtaaagcaacttttttttttttgtttttttgagatagagtctcactctgtcaccaggctggagtgcaatggtgcgatctcggctccctgcaaactctgcatccggaattcaagcgattctcctgtctcagcctcctaaatagctgggactacaggcacgcaccaccacgtccagctaatttttgtatttttagtagagacggggtttcactatgttggccaggatggtctcgatctcttgacttcgtgatcctcccgcctyggcctcccaaagtgttgggattacaggcatgagccactgtgcccggcctcatgtagagcactttaaaagtacattggatccatagtaatcacttaactatgaacttgtatatccatatcaaaacttcatgttgtacagcttaaatatagacaataagaataaaataaataaatgaaaatattttaatatgctgagccatgttctggccatttttctctggccttatgtagctttagcttttcattctcaaagcatggatcaaagagctataagaagaaattaaccagagactttatcctgattgtttcacatttccaaaggcaataaatcagtcatgggctgagagaagagaactgaagtctaccacaacaaatatatttctgccattttttcttttatttcctataggttttgctttatgaattttgacatgatattttcatcatgtgtagatatcatacctctttatgcttttattgcaggtgaagtcatttcctaacatcactgctccctctcccttctcccagcagttatctatgtgaaacaaataaatgttatttgtgaggttcagctaattcagataattagcattaccaagaggcttacaattattctggaatttgtgtttgcttatttgtttccccaaatacagctaaaggagaggagaggatcaccagatcttatagtaggcaaaactatgaattattagtaaatcttcctcctggctttctatctcactggctgctcattctcattgtccttcactctttctcctctgtttaacttccaaatgccaagcatccctgggagtattctcttcatttattacattcactcaaatggttttaaataccatacatatactgatgacacctaacactctagttctcgtctgtgtctccctgaactccagactcgtaggtccaactgacttctgcatatggctgtccagtcggcatctccaattgaacatcgtcagaacaaaacttcaggcttttccccaaccagctcttctggtcttgcccatctcaataaacaccactgctatctrcccaattaattgagccggctatctggtagttattcccttctttgcctcactgtcttctgatccccatatcctataaactctaataccaagtatccctggaatcctttcagtttttcctatctttacttcttctccttagtctaagctattatactctcttgcatagtttagcggtagtttttaagccctttttttatttttattttacgtttgccttttctaacaaattctccttaaaacagccagaatgatctctttgatgtatgatttagccaagtgtggtggctcccactagtaatcccagctactccaggaggctgaggtgggaggattgctgggagttcaagaccagtctgggcaacatagtgagaccccatttctaattaaaaaaaaaaaaaaagaagaaggaaacatgaattagattttgttgctcccttgtttaaactctctattggctttttacttcatttagaataaaatgaaactccctgtcctggcccctatttgatcttatttcctgtcactttcccattgtctgttatacctcacaatcactggactgcagttattgctgttcctccgaactacaggccttagggcctttgcaattgctattttctatggctggaacactttctcctcagatctgcaaaagattggtatcttgtttagtcagatctcaaattaaataccacactctcatagaggccttctctcacctcaggctggtgttggtagcagtcattgaacttcacaacaccttatgttaatgttgtgcagaacacttaccactgcctgatattttactgataggtcttttgtctgtttcctgccactcctgcccctgaaatagaaagcaagctccatcagagaagaactttatctgtttgttcacggcagtaattccaggccttggaagagggtttggcacacagatgttacttaataaacataagagtgaatgaatgaaaattgttagaagacaccatctaaagtgagtcagacaatatgtccagcttcttgtgtgtgctaattaatgacactttgtggactatatatctgtatataactacttcatttcttacagagccttgatagatgaaagtaactagacatttaacttaaaaggtgctaggtcatcttcagttccaggctgtaagcattaagattgactgtacacgacctgttaaaaccattttctgggaaaggctcttaagtacctgtcagagtttacaatttgagagcaaacataaataaacccaaacgcctttcaactttgaacatttgatgcttgaaaatcacctctatttaaatttttgctagtcacatcttctcatcttttggtttcaggacctgattcatcagtttctatagatccatttataaactcagtcagcattttactttgccagcctatgagcacaagtaggcaactggaggcttggaaaaaacccagacaacaacaatttgtttttcactggttctgctttcaaacaacttccaagagcacaatacagcaaaaagtgagagttatctatttctcccttcttcatccgaatacaaaatacatcctattttactgctttttttttgtcttttgcctctactttaagacttatctaagaaataaagaaaagccaaccactcgttctatccacagaagaaaaacacacaccagcatagacaacacaaaagactrtgtctagatgttaagactatatatcctataggactataattttcatagatctaaaaagtgagaaacatatatatgtataaaattatgtgggatgcaagttactgagattttgaatatggggctctgtcatttaccctaaaatgttcagtggtcttttctattttttctctattctcagtaaaatagaactttctcaacaattctggctcctactcttccaatgggctcagcttgtctcatgatttaatagtactaaaaaccttttcttaaaaagaaaaaaaatcctttttaaaaaagtttaggtataaataagaaatttctatattatgaaagactggtttgcaaagaaactttaatatcttctggatctcatctcaatcacagtctatgaaggaaataaaataagtgccttctaaaacggcctattatactactatagctgttgtctataaggaaaaagtttgttagtgagttgtattcaatagaaaacctcaaagatggctgggcgcggtggctcatgcctgtaatcccagcactttgggaggccgaggtgagtggatcacttgaagccaggagttcgagaccagctttgccaacatggagaaaccccatctctactaaaaatacaaaattagctgggtgtggtggcgggcgcctgtaatcccagctatttgggaggtgggagaattgcttgaacctaggaggcggaggttgaaatgactctagatcatgccgttgcactccagcctgggcgacaaaagcgagactctgtctccaaaaaaaagaaaagaaatcctcagagaagatatcctagaactatttagttttcccttaatcgagtctgaaaacctcctgtgcccttccaccacttaataatctaaccaactattgtaaaattacctattcttctaaaccaccaaatagttcgaatagaatagccttagatatctaataactaaatgaaaccacagtttacctctctaggcttcagtttcttcttcataaaataagaagcttgaactcgaaaagttttagatgcgaagttcccaaaaatctagtagaggaagcaaaactctgtttggcaccctgtttccttgccctggacttttagcatttctttcttctggtgtaaagtcaaacaaaaaatagagatgaatctctaaatttacctttttattggggagataagagttgcaatacagggcatacacacagacctgatagtcttctgtatgtcagaagaacaaagagaaggttggaggttttacgaaaaggagaaatgtcttgtcctgaaagaaatttcactggcactagtaaagttgtggggagtggcaacctctgattggtgagtgacaacagtgcagtaggtaaaactaatcttagactcacagtggttgtcttagctgctattagataaaagtgatttcaggttacagcaggcagtttcagcagctaggtttgcagagaattacattcctagaacatgatattttaatatacatatccattgtgaaataaatactataggcaagcaatttaacatatttatcactttccatagttaacatttttgtaagagcacataaaatctacttattctgcagattttgaatatacaatacaatattatttactataatctttctgttgtacattagatctctagacacactgattctttttttttttttttttttttttttgagacggagtttcagtcttgtcactcaggctggagttcagtggcgcaatctcggctcactgcaacttctgcctcctgggttcagatgattctcctgcctcagcctgccgagtagctgggattacaggcatgcaccaccatgcccggctaacttttatattttgggtagagacagggtttcaccatgttggccaggctggtctcaaactcctggcctcaggtgatccgcctgccttggcctcccaaagttctgggattacaggagtgagccaccatgcctggcctagacatacagattctacatgattacaagtttgttccctctcatctactttccattttctcctctccctgcccctggtaaccaccattctactctctgtttctatgtatttgatttttttttttttttaagattctacatgtaagtaagatcgtgcagtagttttgtttctatgtctggcttatagttcacttagcaggttcattcatgttgttgcaaatgctagaatctcctttttaggttggataattattccattgtgtatctataccacaatttatttaccgcttcatctgttaatggattcttaggttgttttcatatcttggctattgtgaataatgctgcaatgaacgtcaaagtgcagatatgtccatgaggtgtttatttcatctcttttgggcatacccagaagagggattgctggatcatatggtagcagaatgttttatttggaagggaaacttttatactgttttccataatggctataacaatttgcattccctctgaaagtggacaagggttccctttattctacactctcaccaacacttgttatctcttgacttttttatacgagtcagtgtaactttaaatccacctggcctgatgctaaattatgaatgggaaaaattatattaatacttagaatcctgactgggtgcagtggcttatgcctggaaccatagcactttgggaggctgagatgggaggatcacttgagccaggagttcgagaccagccagggcaacatagtgagacctcatctctctaaaaaataaaatattagcctagtttggtggcacatgcctgtagtcccagctactcaggaggctgaggtgtaaggatcacttgagcccaggaggtcaaggctacggtaagccatgattgcactactgtactctagcctgggtaacaaagcaaagcaagaccatcttcacacacacacacgaaaaaaacttagaattccttttttttttttttttttttttttttttttttttttttgtggtagggtctcattctgttgccaggctggagtgcagtggcgatcttggctcactgcaacctctgactcccaggttcaagtgattctcctgcctcagcctcccgagtagctgggattacaggtgcctgccaccatgaccagctaattttttttgtatttttagtagagacggagtttcaccgtgttggccaggatggtctcgatctcctgacctcgtgatcctcccgcctcggtcccccagagtgctgggattacaggcgtgagccatcacgcctggctaaacttagaattctttacattcaaataatgtctggtatttttttacattattttcatgtatattccctaatttaaacttatccccacccccccccaccccaccatgatgtcgtcaacacagaactgttttctagattaggaaactgaggatagggattttaagtatctcgctcctagatcaggaccgcatccaggttgcagaatcccaatccagcactcttccacatagtcacagcactaccccaactctaatctactgatgacacagaacaaaattaaagtccttgtccaaatcccagagttcatgaacacagagatgttaatgctcctgtagttcatactgcaaaaagaatgtgagagcttgtttcatttttcacttagaaaatgtatgagatgttctttctgaaggggttctgtcactaacaggttgcattacttgtacaaccattatatctgaatcttcccagaccgtggtttttttttgtttgtttgttttgttttttattaaatactgtcattaaaccagaactcatggatatctatgtcatttccagctataaaattctagaaacttggggattttacctttttgtttcttattttattttcttttttatcaaaagccttatcacaggtaaaatggtaatctaagcaagaataagctctgtcatgatttatgaagcatggaaattcagctgtggccaggcacagtggctcacatctgtaatcccggcactttgggaggccgaggtgggtggatcacttgaggccaggagttcgagaccagcctggcccacatggtgaaaacccgtctctactaaaaatacaaaaattagctgggtttggtggtgtgtgcctgtagtcccagctacccaggaggctgaagcaagagaatcgcttgaatctgggaggcggaggttgcagtctttagcatgggtgacagagtgagattctgtcttagaaacaacaacaacaacaacaaaaaccaacaacaagcacaaaccaataatagaaactttaaatgattctgagccttgagaggaatgtgattatgcaacctgggaaattcacctgcccatgaatagtatctctgtaattaataacaaagtcttacaggacagtccttgccatcaccatatcataaacgtatattgcttcttttagttcataggaacagggtctcctgctgtgtcatagctgtaggatttagcctaaatgctcagtgagtttgatgctcccttgagcaagcccgcttatttaagaaagtagtttttggatattcatggtttattgctgacagttaacgttctcaaaatagtgagagtcctaaagtcaaaggggaatttattaacaattttatttctgagaggatatgacaacaacaaagacattaataaaaaacaccagcgagctttctggcaatatgtattaaaattttcaaaaacacttatactctcgaatccagcagttattatttcgggaaattgctctaagaatattatctttttatacaaagcattttctgaagagaaktattcaggaaattttcatttatgaacagaaaaagtccaacattatggaaatagtgatataaaatacagcatatatagttctttggtattttacagtcatgtaatcatggagagaaatacttcagataaattaacataataaaccacaatacaaaaaagtatatttacaatagaaaaaaagtttaaaagtgtgttagcaatacaaataaacaaatacaagaaggatctatcacaacaatgctacagtgatgagccttcagataattttcattatttttcttgatacttctatatgttcaaaactttcattaatgagcctgtaataccagcactttgggaggccgagatgggctgatcgcttgagctcagtagttcaagaccaagctaggcaacatggcgagactccatctttacaaataatacatacatacataagtaactaagtaagtaaattagccaggcatagtggtatgttcctgtacttccagctacttggagggctaaggcaggaggattgcttgagcccaggaggtcaaggctgcagtgagccatgtttatacccctgcaatccagcttgagtgacagagtgagaccctatttcaaaaaacaaaatttcactgatgacaataaatattaccttgacatcaaaaaaaaaaaaaaaatccagtgcctggatgatcacccagtagcatctaaaagtgcatttgaatatatatccaggttctgatgccagcattgatgcttgttatgtgacaaaaagaaatcacctaactgctttgggcttccatttcttcaaagtaaaatgaagtggttaaacaggattactccccagatgtctccccaaactttacactggtgtaataattgtttgcaaggatcattgggtgattatgtctaaaagcctgcagttattagtcctcatatcaggaatgtgctatccccattcattttattgtagaacctggtttgctgtgggatagttgaaatwtgaagaattcacttggtcagtgtgtttcacggccttgctactttttctgcttggatggactcacttctctatatgattttctctttaaatcagaagtatttgacctgaagcagtaactcctctattcatataatagtgatattctgatacatatgtgaatattataaaaataagtagaatgataatattattactaatattattgtggcagtaataatattatcattcacatgtgatcaatagtaaaagcacacacagcaacccctcaggatttcatcctcaggccattgactcccatcacctttactgatatttagcttagctttacaatcctcccctttgaaaaattcatattttaaccttgcctcccataaagacacacattttttcagatatagaatttgcaaggctgagacatatctttttagaatgaacccaatataaacacaaagcaacataggagaaaagtactagttacatgcccatggcaagaaaatatgcctgaaatggttctgtttattttgttgttgttgtttctgcttggaatttcagcagttatttggcaaagtgattagctagctgggaaggaagaaagctcgtctccatcagccttttgtcagagcccgccttttggtcccrgagcccccatgaaagtgtgctgtagaccaggaccactgttgccctgaatgcatgagtatgcagcctttttatcgtaggcttgtcatctcctgagttctgcaatagatgccatgtgaaatccagtatatactcagtctaacacatagctgctgcataagaaaatttctttccatgcttaagcaatttctgcatagagcttaattcatagaaatcacttattcattcaaaaagcattcactgagttcctagtaggggccacatattacgctaaagtagatacaaggataaaccaaatgtagatctgtcctttaaagagtataacatgtagggaacaactacactctacatggcaatagaaagtcacaagtgggtgagaaccacaggagagaaacagtcagagggtgatgacagccagaactggtatgatgtgaaaggtcaatgacatcagaaacggcctcagggattttatagcctggctccttcaatttcagttcttggtataggccagcttttcaggactgttgattgtccctcttctttgtgtgaaattcctagtgsacagagcttctgcagtgcctcttaggtactttgaaaatcccaacgataaacatctggacccaacacagaagcctccaggaagctgtcttgttggcagtcacctacgagcaggcgataaacacaacacattaaatagtatgtaatgctccagggattgcagtcctctgcctcctaatctctctgtcctttcctcttttattgacytgtcaggagcatgacasttgtgcacaaccattagcacacaagaaatgactttcctgtgggggtgatggggactggggaacctactctttgagatagaaagttaccctgatgcagaataattacagtccagcttagcctccttataagcgattaatcttacttttcctcttagcttctgtctgtttgtaacctgaggttgaccgaagttagttcttttagttggttcttgagaaaaccctttcagtctgtatttccaggaataaatcttaactctaatttaaaaaacaaaarggccctataaatagttacttcaaaccctttaatttatagctgcattctcaatgtcttcatcctcccaaaatcactcacctctacatttttgccctaagtacctaggttagcacaacttttcacaacttctctttaacatttctctgaataacgtgaaccttccttatttccttaaaatataaacttatatatgttcttcctaggagattttcaacttttctgttctccacttattactctattcactctgttctctatctgagctgtcactaattagtatctacttaaataaatatttgagcaatttaacattacagtttttttttttttttttcagcaagaagtgtgttcattatccattaaaagcctgggagagggactactaatgttacaccatcaatatctatttttagccacttcggttttggaagtgtctcttcttttggaagtgggagaccaagtggaggggaagaacatgaacaagggattgaagccattgagaaagtcatttattcattcgatagatatcttctgagcactgcgctaggacctaaggacagaataatgaaggcagagtttatccttccactagcacagcagtcaaaaccaataggaattaagattrtcagaagtgacaaaactgtacatagacctgttcacataactaacaagggaaacgatggaggtgatrtggaagtctgaacgtggtgcaggaataactcagccaacatccccctcctttgggaaatttagatagatgtaggtagattgagaagtgatataacagtcatgtggcatcattgagagagtcagttttctataatgacaaagacatggaaagagagatgtttagtacatgtacagcagaaggagttgattcacaacgcaatggaaacagaagtcaagaagacagtgaagtggatgaagcaaggagaaatcataaaaacaagcacactgggactgtcggacctcaggggagagtgacgtggatggtaaaccaagtttggggccagagaaaagtgaaagcttgtgctgttcttgttggtagtcatgggcaggctgtagcagggttattattaaaactctgatcccccaagtccaactgaaggggctccagtcactaccccatcatctcagtggtgagatgtagtcaaggcatctaacctctctgcctcagtttcctcatatgtaaaatagagacaatcattataaagtgtttagcagaatgccagatccacagtaaatatcagtaaaaggaaatttrtaaatttgtaaattgttagggaatggggtgagaccctcaagattctaatcttcaagggaaagaggatgctaaggaaagtcagaggaagcccgagaatcctaagagaggatgatacaagcaaattaattaaggaataagatcaaagaatattgggaaatgtttaatccacttggtgtgggaaaaggacttttwtgtttgtttgtttttgagacggagtcttgctctgtcgcccaggctggactgcagtggtgcgttctcggctcactgcaagctccgtctccctggttcaagcgattctcctgcctcagcctcccgagtagctgggattacaggcgccagccacaacgcccacgcccagctaattttttttttttttttttttgtagtagagacggggtttcaccatgttggccagattggtcttgatctcctgacttcatgtgatccgcccgcctcggcctcccgaagtgctgggattacaggcgtgagccactgagcccggccgaaaaggactcttttttttttttttttacacagagtctcgctctgttgcccaggctggagtgcagtggcgccatctcggctcactgcaagctccgcctcccgggttcacgccattctcctgcctcagcctccagagtagctsggactacaggcgcccgccaccacacccggctaatttatttatttttttctttttttcttttttgtatttttartagagacggggtttcaccgtgttagccaggatggtctccgtctcctgacctcatgatccgcctccctcagccttccaaagtactgggattacaggcgtgagccaccgcgcccgaccatgaaaaggactctttttaacctcttctccatgtctaatctgagtttcaacctttttattcttattctgttataagtacttctcccattcaagagcatataaaactagaattactttgggatgagtgtgagtgggggagagagaaggttgggagatcactagttgtgtttgctggtactgaatcctaccctaatacttccgaaatgaacctcattggataactcaactcttcattatgtttttgctaatcttttaggagcctttttgcaacccaccgtctccctaccctcgttgggtctttttttttttcttcttcagtcagggttttgctctgtaacccagtggggaaagtggcatgatgatrgctcactgcagccycaaattcctggactcaagctattttcccgccttaccttcctgagcagctgggactataggcgcatgccatcatgcgtggctaatttctaaaaaatatatatttttgtagagacatctctctatgttgcatttctggtcttgaactcctaggcgcaagcaatcctcccacctcagcctcccagagtgctggggattgcaggctgtttaatagaagttatcaacatatggagtcatttatgtctattgaaatatgaacagccaattcccttcacttgtcccatttctaattcagacactaattctgtttcagtttaacttggatcaatggacttatctttgcttctgttcagttatctgtttcaacaacaataagattctttatctatatggcatagtgggtgaaaggacacactaaccttacctactgctccttttatgtcagaaaatccattttctaatcactttttcttggacccaagtgagtctgttttttcccctacattttgtaatttgtcacatttacattttaggtgggttgttctaatcgacttttcttataaaagggtagtggttctagatcaatcgccatcaatcatgctaccaagcaatggtgaagtaccctttttaaaatattttatttagaagaatttcttatttcagatacaacagatgatacaagttgaatctagtagggtttagtaagagacaataaacatattaaacaaagccttacgtattttttaaggtgaaaaaaatcccccaagatagagtccgtgcttagaaactacccctgttaaatacttaatatataacatttgtaatgttcaaataccgaaagaaaaaaatgtacttgttcagagtctattcttgagtcaacctaccttctcagctctactgaccccaaacaaggtaaacaagctgatttaagttacaactaacttaaaaattatacatctaactcttttgtaaataactttagggctggtgctcaaaataattggaactagctatgaaaagaaagctagaaatgagaatgaggaaaattggtagtaagtgtctatagagaagtgtggaccatctgcaattcctatatttaaacagggagaagagggagatggggactcactctctccctcacaaccacatgactaaactggcccagccaatatctcatcaggtgtctccaccactttacaaagccactgggaatttatcaagggataaatacaaaactggtgtagggagaggggaatgggaagttacttccaaagactctgaccctgagttcttggcgtttattcttttttttgagacagtctcactctgtcgcccaggctagagtgcagtggcgcgatatcaactcactgcaacctctacccctgggttccagtgattctccagcctcagcctcctgattagctgggattacagacacccgccatgacaccctgctaatttttgtaattttagtagagacagggtttcaacatattggtcaggctggtctcgaactcctgacctcaggtgatccacccaccttggtctytcaaagtgctgggattacaggtgtgagccacygtgcccggcccttggcctttattcyttattttccctgatattaatccctaatgaaatgcatttagtacacattcatctttttaaaatgtgcagtttttgtcacagaagtagtgtaaaggacaccagaatggttggaagacgatttttgtggtcttctacaagtcctgttttggtgactctgagcaagtcttaaccttgcctacatttcctcacatttagggcaagtgtactcttcagggtcaactgcaatatctgtgggagtgctttgtgttttgtagcatgcatcttactagtgcttttgttgttgtttgcgttgtcgtgygggttccccacctcccccataacactgtaaagaaatgctgagactaagtggtagggagtggcagccatctggtgaggatggaaagttaatatctttatttatgtaataaacctccctttagaattctgttactgtcaaatttctcctggaattctaatagtattttcgctatgtgttttgaccttttgctattgggaagacacaagtttatgaatgacaaatgggtaggggaatttaggctgcacagttaagtaggaagaatgaagtctttgctagagttagaatccagtttgaccttgaacaagttactcaatgactaagctccatttgcaaaatcgttttgttaaagggattagaggtaacatatctacatatgtacatgtgtacagtggtatggagaatggactggatgaatgcgtgctgttaccaatgtgataattactattctttttaaaaatagagtattttatgcatacacaatacttattcaattcaatttgccttagtgcacagtgatggaattttagaactggaattgacttcagaaataatctggtaaacgaaatcttttcgaggctcttcattttatggttgaggaaactaacatcctgagagctaaaagtcatcgttttcctttaaaatatctaaataatcccagatgttggatcagaactccaaagtcataatcagggcttttcctatttctatagtatttctaatactataacatgctattgctcagtcttttattctctaattccatcctggtttctagaccaaatatacctaattgtattctaacccacaagtacctcatcaatgagaagtctgacctatggtttatgatttccgcagacttaaatcaaccctgggcttctatccttatactagttttattttatgttttttgtttgtctttagagaaatgatcgtgttctgtcatccaggctggagtgcagggacataatcacagctcactgcagcctcaaactcctgggctccattgatcttcctgcttcaacctgctgagtagctaggacyacaggcacgcaccatcaggcccaactacatttttaaatttttttctagagacgatgtctcgccatgtttcccaagctggtcttgaaccctggcctcaagcaatcctcccacctcagcttccctaagtaccaggattacaggcataagccactgagcccagccccacccttacatgttttctcttggcatcctgatccctggacacaaccccattgagatacccttccatttaatacttttcttagtcatttaccaaatgtgtttayagtaatatattcccatatatttgtggcagagtacagcactcatataaattttgatgaacacagacatgctgtcccatacttgtaggtaaaacaatcatgtgaaattaaaataaatattttgtttagatagatcttgactatcatacacttattctaacaatattgcccattcctcaaaacattctgggaactccttgaaataaaactgactatggtaagaagagtttttctgggagttgggaaactgattccattagaaggcagatggtgatagtctcacagcacactctctcccatgcggtctctattctacaggcatgcagatatttccaaaagcatcccttccctccagggtcctgaagaccctacctctggttctgccttggactgctctcagtgatattccctttttttttttttttttggacggagtctcactctgccgccaggctggagggcagtggcaccatcttggctcactgcaacctccgcctcccaggttcaagtgattctcctgcctcagcctcccaagtagctgggactacaggcacgtgccaccacgcctagctaatttttgtgtgtgtgtgtgttttttttagtagaggtggggtttcaccatgttggccgggatggtctcgaactattaaccttgtgatctgcccacctcggcctcccaaagtgctgggattacaggcgtgagccactgtgcccggccgatattcctgtttttatggttgcaattgtatgctatggcaccggtactatgtgggaagaatgatgctaggtactctactggtatggcctcatttgtcgatttgaggattattggtttatttatgcaaagcacataggatcataggattgctctctaggagaatggagtaattaataccatgaagactcatagacaatgcttcctcccctagaaactcattatttttcgaattttggcactgatctttcctgcctacttcctggcttttactaccttgtgaaaaagccccaagtgttagaagcagcttccccagyttactgccatcccttctaaggtccctggacaccactgcttgtctcctaccttagaaagtgcctacttggccaggcacgctggctcacgcctgtaatcctagaactttgggaggctgaggcaggaggatcacgaggtcaagagatcgagaccatcctggccaacatggtgaaaccccarctctactaaaaatacaaaaattagctgggtgtggtggggcatgcctgtagtctcagctacttgggaggctgaggtaggagattcacttgaagccgggaggtggaggttgcagtgacctgagatcacgccactgcactccagcctggtgacagagagagactctgtctcaaaaaaaaaaaaaaaaaaaaaaaaagtgcctactcataccctcctcctatttattctgatttctgtgcatgtattctttttgtttgtttgtttttcagagacaaggtcttgctctgtcacctaggctggagtgcagtggcacagtggcatgaccatagctcactacagcctcaaactactcctgggctcaaaatgatccccctgcctcacctaccaagtagctgagactacaggcaaatgccaccatgcctagcctgtgcctgttttcttaaggcagaaatgatctaaaagtgtggcagagggaaaagaagatgggacttagagcttaaataaatctagatgaaaatgttggttctatcactcacaggttctgtgatgttagggaagttaagttatttgcaataaaaattattaatattgtagaacatgtattgatcctatgtatcaggcttgaattaggtgctttaagtgggttgtctcaattaattcatcactctgattttcaattttctgttctaagaaatgagatcaaatatgcctatcttgccgaagagtagtaaaaattagacaggtagctgcctctggatcctgcagggtagagaaagtattacatatctgcatgtgtggatgtgaaggacacacagatacataaggtaaatgagaatttattataaaggtgtatttgacaaaaattggggaaaaaaggaaaattggagaagatatctttctgtgagattaaagacaaataggggaaaaaagggaccaatgacaagaattagagcaaggtatgtaawgaattccagagctggctctaagagatagagcagctggtcatatrtgaaagggatgattcattcttcaggggctatccctcgtgatcctatttccttgcacaagctatcagttaatttattgattcacctcctttatgtgctcataggcatcaagaatacaatggatcacatacaattacagaaaagtttcatttcaggaggtcaaacaggaagtttctttctgacttatattgaagtactcatgatgacaatggagaaaaatgaacataatcttttatgggtggggaccatgtgatctcttttctttcaagctccagagggtttataagacatttccatgttcaatttgattccggaaattatatgttgggtagaacagactcttttyggcaactcatgagaattgccaatgatcccagcatttgctactcttgatagtaattcccttcatttcctccatttttatacatgacctgcagtaaatattgacagttactttgctggaaagaataacacagagacagcttttcttaagctccaaactgaatttcgtggttaattgattggccagctggccctgccgtctcttgacctctacaagagccagcaagattgatggtttcagcagcctttcatggtgcactaaagcattcagatctatcttttgttatttgggaaacactaagttcttatgtagcacattatttacatggactcaagggctgacgagctgggaggcagcaaatgcccaaatggaagacaatgtatgtagatcaaagaagccgatgagacagagagttcataaaatgtgaatacaattccaggggagaattgatgattatggaagcagaaagccaattgagttaaatattcattccagcaacaagtctgatcgtctcactgggacctgtgcctttccgaagtttcctcakcttttcaaggtctacacaaggaaagaacaaagccatcaaggaggctctcattctggaaagccggctgcaagatggcatgaaccagaggtcagcggccaccactgagagttcatcgtattcgcctctgtaaagaataagcctcaagcagtggttctgcaggagcggttcagcatcatcaataccaatgagccctaatgaatgtgacaattcagaatgattgggccttttcctccaaaacgtttttctcctcaaaagtaaaacaggcttgaaactcatgtcttatatatgctgtttagattttcatatattaatgtcacgaatcagatgataggaaggtatattaacaagtgagacattgggatatggccccttgttcaagagcatcaaagcattaaatatgttgttttaaaaatacctttggcatagttttaccacctatttctcaattgccatcaaaattttaacttttaatgacttttggaagtaggttagatggggtggtgggagaggaatagaggatacagaaagataaaaactaaatccaaaaatagtattgaatgagaattactaataagaattattaattgagtgtcttctcataaaaatagtaatatctgttctttggtctctcacaatacatagtttaactccatatataatttaatgaatgcaatgtgtcactttggttataggtttgcatcttggaaacgatgttagtagaaacaagtcagtttccctctgttcctttttgcttagctttctgggctatcttcaccaatgccacagtccatctgtaacagaatgcattggagatttgaaaaatcacgacagataataaatctctatatacttctcatcctctggaacaattgagacattgaaattgcctgatctttttgagtgagtgttgccactttgacccaggcaaatgagaaataaaacaacaataccaaccagcagtttcaagtatccttctgctgcataataactcagcagtaggctttgctaatggtgtttatgagctgccaggctagaattggcccttaagcagggaggcatttgcccagtgggcttcttccatgtgggggggcctttttgcagcctgggggcccttttaggtgattctcagccggagcggtctcttcaggccaaagacttttgcaatgagctaactatgttcaattattgctttcagatccaccctacattcaaatgttttgggacaccaatgtaataccataaaaatgactgtgtaggacacgcctatgctaatgtcatgactggtttgttttacgtattatttatttatttgatactgttaataaaaagcaaacaagccaaaaagaaatactccccaacgtttaatagagatcattgtatcctaaaatcttatagcacattagagtgcaatgaagctcaatgtaacaagcatcaacaatcaactacgaaatgagtatggaaatagagtatatccaaggaagacagaagtgtagaccacatgatgacagcgggataaagacaaaggagaaggtaatcgagagccaagggttaaaccattcaaattgtcctttggcattaaaatgatccaagatgtttcatgagttcaggttaaaaaaggaaatcagtaaaccccaatatactttaagtttcatttgacgcccacaagctgaaactacctctttgtggtgtgtgtctttacatcagcaaagagtataattgaatttggttattatctccagtgctacctgtttggacctgctatttcaccttcctgaaaactgttgcattgagttctactggggaaaattcttaagataacatctgtttactaagaagggggtgtgcttacctgctctaaggtattgaaatacattgtaaatctatacctaattcatataaacataatttcaaggaaaaacaaaaacataagagacagaccctggcggagtgccaaagaatttgtcagggtcccagtccctgtaccttatgggagaattaaattcattaaactgggccagatgtggtggctcacactggtaatctcagcactttgggaggctgaggcaggtggatcacctgaggtcaggagcttgagaccagcctggccaacatggtgaaaccccatctctactaaaaataaaaaaaattagtcargcttggtggtaggtgcctgtaatcccagctagtcaggaggctgaggcaggagagtcgcttgaacctgggaggcagaggttgcagtgagccgagatcgtaccactgcactctagcctgggcgacagaatgagactcagtctccaaaaaataaataaataaattcattaaactgaacaaattgagcccaatttatttgtcatagttcaaagaaaaggagagagtagagtaaaggggcttagtgcaaatgtctggtcagatactcaaaggtttagagcctcttaacccttatatttctttacataatttattctcattattttttgtttgttttttgagacagagccctgctctgtcatcagtctggagtacagtggcgcgatctcagctcactgcaatccctgcctcctgggttcaagtgattcccctgcctcagcctcccgagtagctgggactacaggcatgcatcaccatgcccagctaattttttctattttggcagrgatagggtttcaccaggttggccaggatggtctcaatctcctgaccttgtgatgtacccrccttggcctcccaaagcgctgggattacaggtgtgagccaccacgcccagcccattcttgtttcttggtaaaggaaaatccaactatatatatcttctttaggatcacytaaagacccatacagatctgtcaaatagacatccaatattttggtaggctttgaaaggaggtgcaaaaggatgagaaggaatttagggagatcattatctgaatcattgaacaaatgctccttaagcacctggtgaagagaggctactgagaagcagagcacgtggtcccagcctacgaggtgacaaagtaaaatggcagaagcaatttgtaatgatctcacctatatgtggaatctaaaaaaaagtcagcctcatggaaacagtagaaaggtgattaccaggtctgggggctaggagagagatagggaaggggaaatgctgtcaaaggatccaaagtttcagttagacagaaaaaataaacttcagtgatctattgcacagcatggtgaccacagttaaaaataatgtatggtacatctccaaattgcttaaaaaaaaaaaaaaggtttcaaatgttgtcaccacagaaaaacaaaaacaaaaacaaaaaaaacaaaaaaaacgaggcaaggtgatggagwtgttaattagcttgatttaaccttcctacaatgtatatgtgttagtccgtttttgcgttgctgtaaagaagtatctgaggctaggtaatttgtaaagaaaagtggcttattttggctcatggttctgtagactataaaggtagcgtggtgctagcatctgcttttggtgagggctcagaaagcttccartcatggcagaaggcaaagggggagcccacatatcagatggtgagagggagcaagagttgagggggaggtgccacrctcttttaaacaaccagatctcatatgaactcagagcaagaactcactcattatcgtgagaacaacaccacgctattcacaagggatccacccccatgaccaaaacacctcccactgggccccacttccaacactgcgggttacatttcaacatgagatttaaaaccatgtcagtatacatacatacattaaaatatgcatcacattgtgccctatacacatataaattattgtttgtcaattaaagaaagaaataattttaaaataaataggccaggcgcagtggctgatgcctataatccaagcactttgggaggccaaggcaggcagattccttgagcccaggagttcaagagcagcctgggcaacatgatgaaayctcatctctaaaaaaatacaaaaattagctgggtatgtggggggtgcacaggtagtcccagctactcaagaggctgaggtggggggattgcttgagcctggcaggcggaggttgcagtgagattgcaccactgcacaccagcctgggtaacccattgagaacctgtcttaataaataaataaataaataaacaaacaaataaaggttgtgttagaacaaaaaagaaaaagagtgacaatgcaagccacatagttgaagttgacattaactagcatgtgccaacgagtgacaaaggaaacaagtgcaaagcaagaaaagttagccattatcatggtccatagataatactctcaaccccggctcttgagtgaagcagtattgtgcagtggttacatttatggacctaatggtcaaactgcatgagttcaaatcccagctttacagctawtggttgcattatcttgggcaagtcatttaacatctctgccttaattgattcacctctratatagagctgataggagtctgaaatagctgctataaggactaaatacattaatatatagatagcattcataacagtgttttgtggactttccgaaggtgctgggccttccagttgccttaaagaatggattggattagggtggaggagatgaaaaaaggcatcacagtacatcaagtgmatggtgccagtgtaagtagaatacaggaataaggaaatgcccagcttgttggggggttagtatgaagacctctaactgggactgaaagttctagcaacagtaaaataccctggcctccaactactaagtaccctgaatactaagatgagtttatttttcattctatagacaatttccatctctttctttcaaaacaaacaaatgatgacrctgtatgagtaacagaagatgactgggaacagaaccgtgaacagaattaagcacctgcaatcaaataaaattcacagaaaacttaatttaccacattagtgatatgcataatcgttgttgtrctggtaaccagctcttcaggaaaaaaaaaagaaaattcctgatttgttaaaatactgtcactatggcccactgaaactatcaaaatgaggcatataacaggaaattgggaggagagttatacaatcagctcttgctagaaaatgatgatcattgacattacccttatggaaccaatccaaatttgggsgttgttttctttctttctacttttgtgtgtgtgtgtgtgtgtgtgtgtgttctctggtatctgtaaataacatccatatcagtttctccatccattctttgcacatcactggtaatgcctgagatcaaatctgccatgcttttccgggcagatccaggctgggatctcagtatccctgcttccctgaagctgtccaacctcactcccttcattgctctgctgtgattaggaaggagccattccaaggactatggggtgctctgtgggataagcccagtccttcttccatacaggaggaacaggggacgggtgctgacaagaggaaatgcatggagcagagagagggaacaggcagatggactcaaggtccccagactctttcgagtgttgartcagaaggactggagctgtgggggaagagggtgggaacagggtagtggaataacatgcagacagatgggctgaactgaaggtccagaggcactcccagccgtcaaccagcagttcttacaccaggttgatgttagggaacaaccccagctttaaaacttatttataccaaagtgccaaatgactcatttgagacaaggctttgatctctggggacagggcgttagacagcatgaggcttaggttgccaggtgtcttcccacagttcctgtcttgtgtatgttacacactcaattcatgtcaggatgacactacattggcatgatccaagggaacccataactgacatgaatatgtgtgtgtgtgttgattggggagatgggaaagagaacatttcttccagattttctagttcttatagttcataatcttaatcctcatctccacttctctgccacttctctggctaaatccaaagcacagcctggctagagaggacttctcttccttgggggttctagtctattctctgagttgtgacaaacatttccattccctgtaattacccacttgccttgtctctgaagaggcattcacagaataaaccaaaagaattgtagtgttaggaagatgtcaaatcatttgacctctactccatctccggcttttccttctccccccatgaaagttatgcatttagttgcctcttgttcattagtctggacttagagcaaagtgactacttcaacttcttgtgctcaacatatgccacagttgcttacatgtgataagtccatttgtcacttgataagcctttgctagaatttccttctctccatctccaaccttataatgatcttgaaggcaatgtcggaggctaggtaartcttctttgtgttccccacttgagcataggtgagctgtcatgtcaatttccttacactactgagaagaggggatgtgggtgggcagggacccccagaaacaactttacccctttcacagtttccatcactgcctccaatgtccaccgacgttagaaagtttgggcagaagtggccaggtgcggtggctcacgcctgtaatcccagcactttggggggccgaggcgggcagatcacaagctcaggagatcgagaccatcctggctaacatggtgaaaacccgtctctactaaaaatacaaaaattagccrggcgtggtgtcaggcgcctgcagtcccagctactagggaggctgaggcagaagaatggcatgaacccaggaggcggagcttgcagtgagccaagatcgcaccactgcactccagcctgggcgacagagcaagactccgtatcaaaaaaaaaaaaaagaaagtttgggcaaaacctagagtttcagggaaagtcatttgaggtttggtttaggcaggaaatagaacaaaaccagtgtactaaggagaatacagtggaaataagagggaaaggaatgaagaaactggtaggctactaaaatgcccaggtacaaactactgaacatccacctttatgctgtcagtgggcagaaaaagaaatagacaatgacaagatacattttgaattagtgtgatttaaggactggctgatgtgcacaaaacatgagagaagggagtcaactttgacagagatttcaagagcagatcactgatgaaatgtgataacattcagaaaatagagaagttgacatgggctttgatgaaaacacaatgagttcagtttgaagcattttgaagtcaaggtgattttgtgaaatacaaacgatgctgtccagcaggcatagaatctatctggagycatttgtacaatatacctatgccttttttttttctttctcctactgtagacttagataggaactcacttttgtcttttttctgctaggccaataaatacgttctcagcttagaaaaggggctttttggtttgcctatttctgtttctttttacagaagttaacacatttatttgtgacctattaaaatcatgaagtattaccactgggttttatgttttaatggaaacatttcatgtttagagaataatgatgcttaaaatttatatgaattaaaattttagcctgtaaaaagagcctggaaatatcttcataccatcatctatccttccacttaaatattaatcacaaagaagatcaggcgtagtgaacatacaccacgcaacctcccattcagagaattcttgtgcaaagaaggattccaaagggtttcagaaatactaaacttcttgaaattgaaattgaaattgaaatccttcttggcttctctacctgttacttcctctgcagtgctcagtatagtgtctgctctccctcctttctttttctttttttttgagacagattttcactcttgttgcctaggctggagtgtaatggygcaatcttggctcaccgcaacctctgcctcttgggttcaagcgatactcctgcctcagcctcccaaggagctgggattatagtaccacgcccagctaattttgtcttttcagtagagatggggtttctccatgttggtcaggctggtctccaactcctgacctctggtgatcctccctcctcggcctcccaaagtgctgggattactggcgtgagccacacacccggtctgctctccctcctttcttcacttttctgcttcctctctcatattaataataagcttctatctttccttaattgtttacatatctgtctgtcctctttctccaccccacgaactcctcaaaggcagagtccctgtcttttttatttcatatccctaatggtagctgcaaagcagacactcaagaaggaaggaaggaagtaggtgggagaaaggaagaagaaaggaaaatgaaattaactactagtttgtttccctgtttcattgagaacacacgtattaaccaaacaagtaaacaattgtcagaatattgcattttaaactcctgagagaagttgctgcttctgtggcatttctatctaattaagtttccccttaaagttgtaatcttttctttcaaatctcataatacgtcttatttaggtgatcataccaattatatctttcccactcaaacccctaaagttatccttgaataaatgagccttgcaaattatatttccccaatttgcacttatttctttcttttttttcttttttctttgagacagagtttcactcttattgcccaggttggagtgcaatggagtgatctcagctcactgcaacctccgcctcctgggtttaagcaattctcctgcctcagcctccyragtagctgggattacaggcgctccccccctccccatgcctggctaattttttatatttttagtagacagggttttgccgtgttggccaggctggtctcaaactcctgacctcaagggatctgcccacttcggcctcccaaagtgctgggattacagatgtgagccaccgcacccagcctcagaatttcttactgaataatccttttatagtttgttataactaacwcaaaacagtagtgggagttcttattcagatagctaamaaattccaggcacctcctgtactataagtgtccctcatagcacaaaggggaaagctgccctttaagaatccataaatgcaatgaaactctacttacgccacccaggttgttaggacacaggaatattaatctggagaagcctttgataatagaatatagtcaaagttgacattgtgctagaatatttgaattttttattttccagaaattattttcactctttgctacatttactgtttgacctcaaaagaatgtaaaagcaagtttttaaatacaccattatttcctcaagaggctacagaattgctggatttttttttttttttggaatggagtcttgctctgccacccaggctggagtgcagtggcaygaccttggcacactgcaacctccacctcctgggttcaagcagttctcttacctcagcctcctgagtagctgagattacaggtgtgtgctcccatgcctggctaatttttgtatttttagtagaggtggggtttcgccatgttggccaggctggtctcaaattcctgacctcaagcaattcacttgccacagcctcccaaagtgctgggactacatgtgtgagccactgtgcccaacccagaattgctggaacttaatgccaactctcaattgtctttccttctgctagatctagttaatagcaggtgtctgatacatgttactgaagtgaatatgaaaaatccagagtaagcaaataaatcatatttttttaattaaaaacatataaagtacatttttgtcaaatgaacctaattggcaaagcaaaatctcatcttttaaatttctgagtttccactattgataaaaaaaaaaaaaataacgtaaaacagtgttggattttcaaactcaaaagaaagaaaaaaaccacaaaaaacaaaaaaagcagaagttgggtaaaaacgagttctgactaaaagctgcaatactgyctcaaatgtgcccrtgaccccacctattgctcaatttctacaccatgagggtaaagggaaacgaaatgcaacttggattcacttgacttcttaagtcttacagagagagaaactgatcagaaaagatacatttttggaggttggtttttttttttaattcttgcttgtaaggcagggcttggtgactcctggtctcctccaatagcctaattttcctcccaaaagtaagcttttgattccactagggtgggcaagtatctttgtactctgccatttcagagataagagccaactgattttagaaatccaagagcaaatgaaatgtgcaacattttactcttggattgcttgagacygcatctgtatgcctattccctggagtgcagactgtcttgtgagcatttggtgccactgaactctgaaaatcagggcatgcagcatctgctggggaacacaatctggtttctgtggatcagaagcatttctctacacgttagagtcttaaggatttttaaagagagcaggtctactcaggcaactcgttaccgtccctttcaaccggagtcagaactaagaatgctcagcagatggttgtggagtgaggtaaatttacatgcagccttcagtcattagtgacagatctattttaaagggacgaggttgtgcaacaagggtacaaaggcagctcatggttctaattgttgggctccattagaaggggtctttctggagactgtggtttcttagagcaccgcagtctacccctgaatgaaaggcatcctgctggctaattaacttgcagcactttcttctctattgkgccttgattttttgttttgtttggttttaatctcagaccttgtttctagtaggactgatggagtcttccattatttcgccyaaatattttatgaagaacaragtttccaatcactcactcactctgatttcattacttttagcatacttttcgttcttataatctgcaataaagaggaagactattaagattcaagcttgtttgagcaagtacactgccagagcaaaatcagaggaattcatggaagactgggaaggtgcaagtaatctttctcttagaattgtgatggtaacatatgaaataaaatgtgggagcaaatgaagccattgaaaagagaggccattatacttctgaccacttgggaaataccccccaaaatagctgaaaggtcccaagaggctgggcacagtggctcacatctgtaatcctagcactttgagaggccaaggcaggcagatcacttgagcccaggagtcagagaccagcttgggcaacatggcaaaaccccatctctacccaaacaaacaaacaaacaaacaaacaaactagccaggcatggtggcaactgcttgtagtctagctacagcttccatgaattgttcagtgatgctctcttaactccatgatctatggaacaggcaggcagaaatggagagacagtgggtggaggggaggagcctcaratggcacagaaatctgtagcatctagatcagagtgacacctcagagtttcgagtaacgacaggcacctggcccatggctgggattgttaccagtggtgaatctgtgcaggtctgcagcaacctcaattcttccctcyttaggataaaaacttcattgaggggcataaagcagaagagactgaagcaagttttagagagggagtgaaagtttattaaaaagctttagagcaggaatgaaaagaaagtaaaatacacttggaagagggccaagcagacatcttggaggtcaagcacagggatttgaccttctgacttgggggtgtatatgctggcctatttccagcacttcacatcccttttcccttgattcttcctttaggatgggctgccgcatgtgtggtggcctgctagtgcttgggaagtgagcatgcrcagtgtgtttactggcgttgtacacatgctcacctgaggcgttcttcgggtgaatgcccccagaaagtcatgtaccagttaaactctgccatttggcctcttagtgcatatgtgtgagccccctgcscaactcctgggaccttatcgggaagctgataatcaccagtttcagatttttcctatttataaaaagactgcctttccctggagctggctgcaaccaattattttagagagacagttaccaaccacctgttcatcacttgatggtggcctgacattcctggttagggcggggggcactgtcctgctctgctcatgtctgcctacctactgtagcaggaccacaggcagacttttcttaaggagactcccagctttcttcctggtgaaggacccagagtttgtgagcccaggactgcagataatcaaaaatattaaattatggaagctaaatatttaaaataataactcataatggctctccaaatgtctgtaaaagsatttcacttaacaatasctggcaaatattatgtcagtggaaaatacagccaagttttggctcatccaaaatgttgtcatcaccgccactttaatatttaagagattaatgtttcaaggctcttccagaacattgtatttggagtctgattgaaagactcctcggtcctccctcattattctttatgtgtgactttggatgctctcaatacacttaaattgtatgtccctgtggggaatggttctcaaagtgtagtatctggagcagcagtatcagcttcacctgggaacttgttaaaaacataaattcttgcagctggatgtggtggcacatgcctataatcccaatgggagaccaaggtaggaggatatcttgagcttaggagtttgagactagcctgagcaacatagtgagaccccatctctataaaaaataaacaaaattagctggacacagtggtgtatgcctgtagttctagctacaggggagtctgaggtaggaggattgcttgaacccaggagttcaaggctgcagtgaactgatatcgcgccactgcactccagtctgagtgacagaacgagactctgtctcaaaaaaaaaaaaactgggggccacacaacagacatactgaatcagaagcctgggggtgtagctcagcttgtattttaacaaggcctccatgcaattctgatgtgccctccagttttagaattgatgctctgtgcaaatgaacaggtactggggcataatgatatgcaggactgttcttgagccaggctttgtattcatgaagtgggtgatagttgattggcattgtttcagtactcagtagctatgaagcattctattggtatcattrgtattaaatatggagcagaagcataactcatctccctcatggccacatgaagaaagatcagtatgttagagctgaaggacacctaaagccccaaacaactgccagagaccaaaatcatttgtctcaagaaatgttaacaccctttttgtgttcaagttttattatttctttactaaaattgcccattcacccctttgttttatttttcacacctaaaaaagtagccaagtttgaaaaagaaagagtgcttgccaccctttctgtccttaaagtgaaggccttgtctatctcattctgatctctgcccatccatcaccattcagcactcctgttgtgacttcgccccatctccaatcttacrttttattttcttggtacttttggtcatggctgtgttgatggtttcagaagaatacatagtatattaaggggtaacgtttacaaatgttcttgagagaactaatttttcccccttcatctcaaggtgtcactgcttaattattacggttcctaaataatctctatgatgtggttaactatccctaccttgcagaaatcctggaagatgagacggacctagcatgttgtgtgagcaacatctcttagagataatcaatttgatatcagcacaattattgtggctactattgaaatttctcttagtttcttagattagtactattggaactaatcrtaaataaccaatttacaagaaaatgagtctcattatattatagcacgaagaggatatattcaaggagatacacctttgaatctattatttcratatgcttataaaaattactattttaataaatttcccagtcaatcctattgtgtagaaaaagatgcttcactgcttacatattttaagatgagactgggaacaagcagattaatttggttgtgagactgggagtttatgagcaaaatgttcttctgtgcaaacgaagtagaagcttcatttcccttcccttcagttaaccctatgttattggatacgtaccaggtactagagattctctccctgggtagtctggcttagaatggctccccaggctctagccatctgcatagctgctagaggaaaaagctgttttagttggctccaagaatgtctctgggaattataatgtattcatagaaatgagtgtggagtgcccacttgcacaatggaagatccacaataatacacctggatctgatagcaccttcctgaacttgggccacttccctctttgaggtttgtgaggccaaagggatatacacagaggctgcctttgtttgtgattacctgggaattagatggggtatcattcccccttatatccttttactatagcttgttcacttttgaaaaggtggaaaactagactaaattctgtattgaaaatgtcaagtcaaatatgctatataaccaagaaatatcagtatagaatatcatgtattctacacaaagctacattttcaatataatccccgtaattatttcactcatcaaagaaatgtatccagctgagacataaaaccttagtcaatacattaagaaaaaaagaaaaaaaaaamcatttttttcccagtcatggggaccagattgtgtctattattcatcagggcctagcacaatgttgagcacatgctcaaggtggccaataaatccttgtggaattgagttatatgggagtcaattattcggtcacagcactggattaggaggttgagttcttgatagatttactttcagctgacctgtgtgacatttggtatttggttttgcaactttgttttcagttttttccatgcaccaatactcctagaattttgcttttgcctcttttcttccctttcatcttttttttttttctgtagaaagcatacatccatatagaagacctctctcaatacattccagatctgagttgcagtgcagcacttagcttagcttgtgaaacactccraagacttgattaatatcatcctatggagagatgtccttaagtaacttagaatggatcctttatttttccagtaaataaactctaaaatatgaggatttccaaggtgaaaagaaagagtacgaacccaagaaatattttaaatgaatcttgttttccgtccctgtgttctgagtaacatctgtattcacccctgcctttccattgattggaaacctttagtattctttgtactctcacagtcctagtttctcagaactgtctgtcccagtctaggcagttgtttcattaaacaaatgttattaaacaaataattttgagtgtgtgtctggtggggaggggaggctggggggttaaattcatgtatttttaggcaagagtattaacaagaattgtttgaaatatttctgaaaccatagtgtcataatgaaaataaaaataaggtggagactggattgtaattaacacagagcttttccatccaagacagagcttaaaggcctctgtttgttgggtcactttaaaaacaaaccctactgccagggatttccaatggcaactttaccgtgcttacccaaatggaggtaattaacaacccttctgtgtgttaaattaggtatccacagaattgggaagcttcagatatttattgtaaaccagagcctcttttcttgttaatctcctaagacagcagactagtgactcgcacccattagaacaaatgaactaagaaactgaatgacaggttctgaggcccctaagaagaaaaaacagagtctggattagagctgcttaacagaccactcactggggcatgctccctccccacgcccatttcctatcccagaaaataacaaacttcagatgacccgccaaaaacgactaccttttatatttgtcgttgaattatttcttctttgtttaaaattaaataatgcaagtgatttttttgctttagaaaggaggattacctcttcctagacatccagttgaaaaaccaactggtatagaagggaaatgcatctcaaacagatacaatgacattcttataattgcctcatttgaaatggcagcatttccccgtgctaattrtcatccttcagctaatttggtacattaaaggagattgttattaaaaacaaaattaaatccattgccagcatctttattctctaccagaagaaaaattttaaataaatgcaaatacgccagttttgctcttaatgttgcctgaagttgaaaggatgaactttgacttgaaagataatgagttccccctgttggaggatytgaggtttgggttggataatcccagatgatgttggaatagacagaatttaaggttccttctaaccctgaaattctatggttataaaatctatccttttcttgaaagaagaaatattaaaggtgttttcaaggaaatggtagcataatgaaaaaggaaacacaaaaatgatttttttttccttaataagcagtcacctcacttggtaatagtttttcttcttaattgcttgtttgtttgtaacaaatgcggtggtgtaatcaagtggcttttacaataataaaacacttctctcaattaaactgtactgcaaggaattcaaagatgaacagaagtgttccttcttttaagatgctgatttataagcatccctttaaaatttacttctctttctgatgataaaagtaatacaygtttattgtagaacatttggaaactaccagggactataaataacccatagttgccccaccagagaatattcttaatatttttggcatatttcttccatatatctattcatattcacattcatactaatttgtcatattctaatttaaccctctctttaatgtttataatgtgattatactactttttaacacatgaattgtctccaaataaaagccaaagtgatccatttgttaattttttttaatcctacccagctgaaatggacaaagaggagcccatctcactcgggggaggggatcaaagagttatcctttctcttgatcaattctgtagcaatcagccatgataagaagcccaaattaccaaattaacaaaaagaattttatttagtggccatatataaaagctaaatggacagttggagacagacaacaaaaactaatataaaactaaaaatgtgaaaattcagcatttaatgaaaatgagagcttagaaaaactagcatccagatttattcagactgaatttctgccctgggaaattaatgaatcatccttcagttcccttttgtgtctgtgcatccagcctcattgtccttggtagtaaattatgtacaccccctgtttccaaatcttcaaatacggtatgcgtcataaagtcacaaaatgtgtaatttgggtcctgtatacaaattctagccagggaatggcttgtagtcatgctaaatattctttacaagttgtgtaacaaagacaaagaaaactacaaaaaaatacagagaaacataaaaaatttcccattccttctgtgattctgatgtatttccctttgattctttgcttctacattgaaatagacttagtgggtaatactaataattacagttaacagtgaccaggtgatatggtttgactaggtccccacccaaaatctcatcttgaactgtagctcccataattcgcacgtcatgggagggatcccgtcggaggtaattgaatcatgggggaaggtctttcctgtactgttcttgtgatagtcaataagtctcacgagatctggtggttttataaaggggagttcccctgcacatgctgtcttgcctgccaccatgtaagacgtgactttgttcctcttttgccttccaccatgattgtgaggcttccccagccatgtggaactgtgagtccattaaacctctttctttataaattactcagtcttgggtatgtctttgttgttgttgttgttttgagacagagtttcactcttgttgcccaggctgaagtgcagtggtgtgatctcggctcactgaaacctctgcctcccaggttgaagggattctcctgcctcaccctcccgagcagctgggattacaggcgctcgccaccacgcccagctaatttttatatttttagtagagatggggtttcgccaygttggccaggctggtctcgaaccctgacttcaggtgatccacccgcttcagcctcccaaagtgttgggattacaggagtgagccactgtgcccagcctgtttggttttgtttttgttattgtttgtttgtttggagtatgtctttattagcagtgtgagaacaaactaatacatcagaagttctgattttcatatcagcacagagaaaagtgaccttcccagtccagtctatcgtattctcaaattactttctctaacttgtgaaataagatcttcttggtgaactttatcagacatttctgaacagaattaccactctgtggtggcctgggtaaatgtaatatatttataataatttgaaaagattcctccaggacttttacaaagacagatgatattaaactgaacaaatagtgctaggtaagaagtaaattgttcaattttttcacagaagccctgtagattttagcaaaaccccccagacacaatgtcaaatttctcagcaggtttcttggttttagctcttccccttaagcagtagttaacagaatattagatgtkagtaaagttatttctttgttattctacctgggttgactaccagagaaaatccctgaacattttacaaattgctcaacagattttcatctaaaactagaaaagattggccagttatggtggctcacgcaggaacattgctttagcccaggagctgaaaaccagcctgggcaatagagtgggacccccatttctaaaaaataatatcttttaaaaaattaactgggcatgkcggtgcgtgcctgtagtctcacctacttgggaaactaaggagggaggattgcttaagcccaggatgtcaagattgcggtgagctatgattgagccactgcactccagcctggaggacagagtaagaccctgtctcaaaataaaataaaataaaattagaaaggataggtgtgtktgggagggagactggttaaycagggtgcatgggattatgtagggcttgtctttcatttgagttcttctctgtctttttaaaatgactgattatatatattaggtcccaatggcttcattatcactattattttaattcataggttaaattttataaacatgaaaaataattgacaagcctagaatctcttttctgtctatattagaaattaaattatatttagtakttaagcaatacatgcatacatctcatgtaatccttactgtaattaaggatgaaattatgtaacataggaaaagcagatgtaagttctcattctccttttacacataaggaaattaattcagacttttagtaagttgcccagaatcacgcagctagtaagattcagaactaaaaatataatacctgtcttctaattcaaatgtttcacatccaagtgcccatatactaataatttttaactcttttgttggggttaaatgagataaaattgagtcttattgtatagaatttatcagaaatagcaaaatttcgcccaggcacggtggctcacgcctgtaatcccagaactttgggaggccgaggcaggtggatcatctgaggtcaggagttcgagaccagcctggccaacatggtgaaaacccgtctctgctaaaaatacaaaaattagctgggcatggtggcaggcacctgtaatcccagctacttgggaggctgaggcaggagaatcacttgaacctgggaggcgggggttgcagtgagccaagactgtgtcattgcactccagcctgggcgacagagagagattttgtatcaaaaaaaaaaaaaaaaaaggaaaatctctaaaatgatacctaaaatgataaacaatttaaatttagcataattatcattttttaacttacagattgacatatttctgcaagtgttttcagaggcattggggccacagaagtccaagtcaaggcaatttttggtactaaacagttgacttttctctggtccacatcaaagctgccactgtgcagagaactaacaygtgtaygtgactagtctagggctggaggaacatgcgaggggactgttggaaaggaaaaacttttgctcttcctctaggttcagtaaattagggactgtaaacaataataatgaaagattaataagaggcacacaattttattttattttattttatttacttatttttttgagacagagtttcrctcttgttgcccaagctggggtgcaatggcacgatctcggctcaccacaacctccccttcccgggttcaagtgattctcctgtctcagcctaccaagtagctgggattacagacatgcatgaccatgcccggctaattttgtagttttagtagagactgggtttctccatgttggtcagcctagtctcgaactcctgacctcaggtcatccactcacctcggcctcccaaagtactgggattacaggtgtragccactgtgcccggccccacaattttattaatatttatatgcaaaagagcttgtagaaaatcagtgaaaatcaaagaagtggttagactagggggtttataaacccttcttaaccaaggaaagagggtttgggcatcaatgagtggcgaattgtggagaagtgactagaaaatgtatgagagaaactaatggaaggtatattagttcattctcaagctgctataaggacatgcccaagactgggtaatttataaatgaaaaaggtttgactcacagttctgcagggcgtggaggcctcaggaaacttacaatcatggcagaaggagaagcaaacacatccttcttcacatggcggctgcaaggagaagtgctgagcaaaaaggggaaaagccccttataaaaccatcagatcctgtgagaactcactcactatcgtgagaactcacttactatcatgagaacagcatgagggtaacagcccccatcgttcaattacctccgaccaggtcccttccatgacacatggggattatggggactacaattcaagatgagatttgggtggggacacagccaaaccatatcagaaggtaaggcctattttagtaagttttgtttatgcaaactcatctcagtgttgactccctatctttataacatgggtcacttttttcttcctgatggtgtgggggagagggcacctatctcaaagagaaattttgctctgcttttagatgtacaagggaaagacagagaactgttcctgcatccattgattatcaattgccttcagctcaaaataatccttatgccaaagtagcatattttggggtggcatatttcaacctccttcatctctacccagctggaactgtccagggagttgcatacctcaaaagctgagttggtggctataaagacaagatttgggttagttcctgagaggtaagagacctgcaaagggaaagaacatagatcagaacgagaataaataagcagaaaagagcaaatctcagcacattcccactgatctcactaaaccaggctcctagtactggaaataggtcagtcaacttcaacaattgtatctcatttcaggaagcagcatgcaggtgggagtggggcacccctctgaagtttggcctttatgctatgtgaataatcacacacttaaagagaggcatttctatgaaaacaaaagaaaaacaaagattaacagttggagcagactctaaagccagtttttgagtccagaaggcagttagttggcaagatttctaaatgttggattcaaggctgggtgcggtagctgacatctataatcccaacattttgggaggctcaagtgggagaattgctcgaggccaggagttcaagataaacccgggcaacacagtgtractccatctctaataaagtcatccaaatgtagttgtatgcacctgtggtaccaactactcaggaggctgaggtggacggattgcttgagcccaggaggtctaggctgcagtgagccatgatcacaccactgccctccagcctgggcgacagagtgagatcctgtcttaaaaataaataaataaataaataaatgttggatgaagtgtctttagatggtggattgaggataacaggggcagtctcagtcacgtgcatttcccggagtttgaargaacatgttctggtgagcttcctgagtggtccaaactacggtagtgataattcctttgaagttaggttcagttgtccaacttcagcttccagggctccaagaaaagggcaattgtggttctcagtgatgccaagtcacaagggtgagagaagactggaaacattaattacaagatggcaggattcagtttataaaggggggaaatatctcaatgataatgaacattcacaagggtgggttatagttttccattaaaacataaaatttctttctacaatcacccccaatgtgatcaaaaacaatcaaagtatgtctgcttgtgtctggcaactgagtctagtctcattaaacttggccagattatttacataataagtgcagcaagaatagtaatttagcacgtaggcttttttgtgtttgctcttctggaacttttaataaggactctcagaatagacttttaaaagctcttgagagtagtaagccaagccaagaactagccattagactttatctgtaatacctatagattggggtgaatttcccttttcttgaggactctaaaacattctgagtttcccgggcctgccagaaagttaccttccttacccacctgtaaggctaggaacgctataaaccagatacgagtcttacttttccaagggagctttgtaagcgttggtgccatatagtcaaccttagttccttaaaactattgggttatatgtgattccacacacattattttcaaacatgacactgcagtcaaagccttagtaggacagccaatgtttccaattgtgttctgttccaaggagaatagattcttatggaacttaggcaaataactatattgccatgaaaattgaaatactcaataagcatttctgaattttggagagatcaggtaggggcaaaagataaatatttcatttttgtttatgaagacataatctattaaattattgtgaattacaggtagcttttagaaagggtttcctgacatccagaagatagaacattaaataaccagcaaggtttcaatcaaaaaggccataaaaattataattgttttttatcagttcattcagtcccatgtaattaattcttgttttgcttgatcttagattagtggatttatgaatccatcagcttctccattagttctggaaatccttactgtgtccagtgttataatcttgaagttatttaagcaatgtcagcagaagcctgtactccagagtacctgccaaggttttgttcatgaatctctaatatgctctttctttgctgaagatgaggcatgctggcctacagctgactgcgtgagccttcagaaaagcatcggcataaaacaataattatctgtgaatgacaatgacttaaaatggccatacctaaagatctgatgarwgttcattataagtcaattgataaagaaatttggtygtttctctgacatacaggattttaagataataatgtgataccaagacatctcatgaacagcaagggcaytgacagatttctaggaattttatatgatttctgaaaaatcaaaatcattatatccatacaaatataacccaggaatggttaaatatcttctctttatttgacagtgcttcccatgcaatttagcatattaaataagctcatctctctttttacaaactgagagaacaaatcctttgagagttttccaggggccctctgggaaattccagagtcaattcaaggtcaagaagacttcatttggaatttgatttagggaagttgtgaaaaacgtgaaaaggtttgaacaattgattaaatgggatcacagatcactataaaacaatacttagttatctatttaaccaaagtgacaataaaagattttcaagataaatatggaagataacataatcataaaaaattttaactctttcaatcttaagaaaacttggttttctgaaataatcaaagacataataagtgcaacataaagcacagaatatttattttctaggtgtatcactcaagaggtaaagaaaacatttcataatctcttaccaagaatagactactcggtatagtggctgaggcctgtaattccagtcctttaggaggctaaggtgggaggattgcttgaggccaggagttcaagaccagcctaggcaatatagtgagaccctgtctctctaagaacaaaaaatagattaataaaccaagaaaacttgctcattttaaaagtagttttgcatcaatacactactgtattagtccattcttgcattgctgtaaagaaatacctgagattgggtaatttacaaagaaaagaggttgactcrcagctctgyaggctatacaagaagcatagcagcttctgcttcttgggaggcatcgggaagcctccaatcatggcagaaggtgaaggtggagtaggcgtcttacatggcaggagcaggagcaacagagggtaaggggtcaggtgccacacaattttaaatgaccagatcttacgagaactcggtcactatcatgagtacagtaccaagagggatggtgctaaaacgttcttgagaaatctgcccccatgattacaatcacctcccaccagagcccacctccaacactggggattacatttcaacatgtgatttggtggggacacacatttaacccatatcaactactaagctcattctttaaaaccttataaatacacccattcagtcctagccagcgtggccacacaatgtaagattctctctctcttctgttctctctctctctctttcactgacctttacaactttctatatcaactcacatttttgtcctttattttcgtctttcttatttaaatgacctctaaactactctaggataaaagtcactgtcatttttctttaacaaaaacacatctcactctccttgtackctttgcctgcagagttttgtttcttcatcctattattactagtagttcatttacayatatttattagatttcttaacccttagtaacattaactttcagtgaaaatgaagaaataaacaatcataaactgtcagttacatacatgcattctgtgctacattagcacaggtataaatacattctctcataatttctagaggcatgtttcctaacagtacaacttctcagtgtggcaaaagagcaggtttattaacagatccaaatacctttagtctctgccaaattaagaagtcaaaagtagccgggcgcagtggctcacgcctgtaatcccagcacttcgggaggctgagaygggcggatcatgaggtcaggagatggagaccatcctggctaacacaatgaaaccccatctctactaaaaatacaaaaaaaattagctgggcatggtggcgggcgcctgtagtcccagctactcaggaggctgaggcagaagaatggcgtgaaccagggaggcggagcttgcagtaagccgagatggtgccactgcactccagcctgggctacagagcgagactctgtctcagaaaaaaaaaaaaaaaaaaaaaaaaaaaaggaaayaaacttaaatagataaactttagtaattagtattttggtattttattttctttgaaattatctacctatttcatgaatatccgtcatttaacttagtataactttaagatttcaagtaaccaaaaagatgtcggaaactatttttaagtcactgtactataaaacagttattgttgaaataaagtttgtcagagtaatgactcaatctgaataaaatgccatctataagtttaatagccttaaacctcagtagttataatgttagtttgactagtaagtccaagtagaataaaatgtatatttcatgttgacaacttgaagacgtaactctctttaattaaagaaataatattaaactggtagtagcggtgaatccatacgggtatgcagcatccttacatcttgcctccttagaagaaagagttcagctgacggacatacgcagagtgagagaccgaggcaagttttagagcaggaatgaaaggaagtaaagtggaagatggccaagcaggcgacttgagagatcaggtgcaccgtttgaccttctgacttggggttttatacgctggcatgcttctggggtcttgcattccttctcgcctgattctttccttggggtgggctgtccacatgctcagtggcttgccagcacttcaaagggtccgcatgcacagtgtgtttactggacgtgtacgcatgcccacttgaggtattttttcccttagcaaatccagtgttcctagaggaaggtcatccgccattttgccttttagtgccatgcttgagcccacttacccaactcctgcgatcttagccggaagctgctgatcagcagtttcaggctcttcctatctgttgggagcctgcctttccctggtgccagctgcaaccaattattattttagagagacagttaaggactgcctgtccatcacctgatggtcgtctgacattcctggttgtggggaaagggaacmctctcctgccctgctcatgtctgactagctacctgctgtaacaaaactagttttatttaccaaagattatcttatatcagataaacttgaaaacatgttggttatatttaaccattaaataatatatttggttatatttctgagtgttttagcaatacttataagygtttttttaagccaacttagaatagaactcatttattaatttggtaataccatcatgaagtgaggaaatgtcacataggtacaacgtacatacatatatacacacataaacatataaagatttatttattttaaaatttaatttatttaaagacagaaacagatagagattattttaagattttagccacaggtcaggtataaatatagaaacacaaaactcacaaatttatatgagctggcatttttgtctttttaaaaaaatctgaattgtatttctggcagatggaacaagaggttacctgctcaatgagggttaaggctttttatcaatattgttggtggagacttaaaaaatttttttcttgacataataatttaatgtagacagtagcattagtctcaggttattgttttagtcaacagaaattaaagccaggtgacttttgggctggaaatcaaagttattaatatttccttaggtgtttacatatcaaagagatggccctcaggtccttgagaagacagttttgggtggtagaatattttacagctgaaggaggaagagaaaggatgtaaactttcaagtagtccctttaaaagggagttttcgggcatttttgtctgttacagggttgctgcgtatcattgttgttattatcaattgttattttctgggacaaacagtaaattcttctggtagcactaagctttrtcaagcaggcattttaaaagtggggttggggggatgatttttgatgggtgtgaattttaagttcttgtctaaatctaatttatgcttgttaattttgttaagggagctatccagtctaaccatgatacacttgtttccttctttcaacttgatcctcccataggtagcaatacgatgtttatttagggtgagagctctctaaatatccttttaaacataaaagctttttcaaatcccagttccatcatctggtctttgacaatttaggatctccaaaggtatacgtgctccaaaatgtgacacaaaaccagtaagacttttatgactcaaaaccaatcatccattttatggtttaaccggggaccaagagttgtccccagagagggtgcagaagactctgccctcatgatggaaagtcattcccaaaaatagccaaagagaaagcgagctgagaccctcatggtcacaggcagcaaaaatggtgtttgtgaaaatggtatctccagcgttacacaaaagtgaggcacctgcaatcacagacttgtggacctgtgacacttgggaggcaatacggagatgggactttttcagcmctaataagacaatgaggaaggacaacaagtgccttgtatgagctgagacactttatttagacaaattccccagattgctgacatagccaggtgggaaattttgctagtgttttttagggtccttgactgacagcgagcacctccagactcaggcccaaccacctgtgcttcccagtgggcaaaaacacagacagaggtgaggcgtggtggctcaagcctataatcccagcactttgggaggctgaggcaggaggatcacttgaggccaggagttggagaccatactgggcaagatagcaagaccctgtctctaaaaaaaatttaaaaattacctggacatggtggtgtacatctgtagtctcagctacatgaaggctgaggcaggatgattgtttgaccctgggagtttgaagttacagtagctatggtcgcaacactgcgctccagcctgggcaagaccttgtctctttaaaaaagaaagaaagaaaaaacaaaacaaaacaaacagagcatgctgttactagatctaagtcaagttctcgggacagaagggaggacttcatcgaatttcttttttattggggacccacaacaacatttgcccaaagggtctgtagtctgctgagaactttaaagtcaccagtctgtgaggctggctcaaacaacaggcttatacacctgtgccaatattctattctatgattttcctccttatgacaaacaacacaaaagacagagacaaagagaaaacaatggctgtctccaggaggaaaaggattaatcacaaaagtcctcaagccaaaaatcacaaaagtcgcaatacccaaagaattatttcttacaaatgttttctcctgccaatctaaatttggagaggaaaagacaaggaaatgctcatactgcactccctcaaccaggctctctgcagaaatcttggggggtatgtggggggatctttttgactgggcatggtggctcacacctgtaatcccagcactttgggaggctgatgcgggaggatcacttgagtccagaagttcgaggctgcaatgagctgtgattgcaccaccgcactctagcctgggcaacagagtgagaccctgcctctaaaaaaaataagataaaaaaagcagtttttcaagggtgtacaatctcctacagcattctatctattctttgattaattaccctcaacccatttagccattaatttattgaacaatgtattagacatccacttcgttccaaagactctactttagggttgaaaaaaacctaggggtgaacctggcatggtttttgccctcaaaattcttaccctatgatgggagagagggaagatatgttcatgattaagctctaagtcagaatggtgaaaaaaatcctttatagaagtacaaagatggagcatgcctcttactaaatagttgtaagagcgagcaagagttactaaagcacttcaggttaaggggaggcagagggtaaggcaggttagtgatagggtacttgtaaaatctccaaagcatgaaaaattttctaatgttttgaagtagcagaatataaagtttgtaggagacaatgtccaaagaagagactgaaatggtagtttgaagccagtctgtgaatccattgaatggaacacttcacagtttagttgcctcttcttgattacagagacttacagaggcatttcaactggaaagtgtttgatctgctttgttcatttgaggaaacaactttgctggctgtgaaaaatgataaacagcatgagggagaatttgctggcaaaaaacaaaacaacaacaaaaaaactaagtttataatgcaacagtcccattaaagagtaacatgaggtgcccttatatacttttagtggcaatgtataacatttggaagtaacttggtagtacttattaatcctttgcaaatctttgcccaaatgagtgacagggtctcactctgttgcccaggctggagtgcagtggcatgaccttggcttactgcaacctccacctcccaggttcaagcaattctcatgcctcagcctcccaagtagctgggattacaggcatgtaattacatgcctggctaatttttgtatttttagtagagatggggtttcaccatgttggccaggcttgtctcaaactcctgacctcaagtgatccacccaccttggtctcccaaagtgttgggattacaggcatgagccaccgtacccagactacaaaaatgtatttatggggatgttcaatgcagtagcagctcatatgtccattcatagaagatgggttaaactctgacgtagctaaaccagctaacacttttcaaccattaacaaagaatggtagagtggaatgtggtggcacatgcctatagtcctaactactcaggaagctgaggtaggaggactccttaagcccaggagtttgaggtcaacctgggcaatatacaatatagtgaggccctgtagagatctataatatgttctgctgtaaacatawgtccacaatataagggccatttttttttttttgagacagagtttcacactgtcgcccgggctggagtgtagtggtgcgatcgctgctcactgcaacctccacctcccaggttcaagcaattctcctgcctcagcctcccgagtagctgggattacaggtacctgccaccatacccagctagtttttttttttttgtatttttagtagagacagggtttcactatgttggccaggctggtcttgaatgcctgacctcgtgatccacctgcctcagcctcccaaagttctgggattacaggcgtgagccaccgcgcctggcctaagggctattttttaagttgcaaaacaaaaacaaagttttaacagttgtcattctgatatgtagaattattaggaaacctacactatttattttttatacttgtatatactttgtggttttgttgttgttttggttttttgtttgtttgtttgtgtgagacagagtctcactccgtcactcaggctggagtgcagtggggcaatcttgggtcactgcaacctctacctcccaggttcaagcaattctcaggcctcagcttcctgagtagctggactataggcacacaccaccatgcccaaataatttttatattcttagtagagatggagtctyaccatgttggcaacgctagtctcgaactcctgacctcaaacgatttacccacttcagcctcccaaagtgctgggatcacaggtatgagccaccgtgcctggcctatacttgtgtatactttgaattgtttcttttttcttttcctattttattttattttattttatattttattttattttattttttgygacagggtctggctctgtcacccaggctggagtacagtggtgcaatcatgactcactgcagcctcaagctcctgtgctcaggtgatcagcctcctaggtagctgggactacaggtgaccaccatcacacccagctaatttttgtattttttcatagagatgaggtttcaccatgttgcccaggctggtctcaaattcccaggctcaaatgaacctcccacctgggcctcccaaagtgctgggattacaggtgtgagtcaccacatccggcctgaattgtttctattattcacatataactttgtaatcttaaaaaaaatacttaagactttaaaacaaagatgattagagcctggattaagctagtgtcggcagcctgaggagggaaggttttggatgccattgccaaagtagattgaagaggaattggaatttgagggatgcaggtgattaaaggagagggggaagagtcaaaggtgacactcacatttctagcttggtaaattggttgtttgtttattccattaatagaaatagagaaaagagacagcagaggagggcttcattgaggaggatgactttgttagtttcattttggatttaagtctgagggtcctgaaaaggcagctatatgtttggcttgaacctctccactttccaccttctcagtaattcattaatattttggatgtcctagcctgttgatgtgtgtgtactggaggtggtggtggtgggagctaatatgtttagaagttaacatttcatctgtctttatccttttactctcctttcattcagaccctacaattattgctacagggaagaaatgtggccttgcctgtgaaaatctagtttttggaattttttttgcttgttttccccctaaaatttagctccaaaagagagaagattcttaactagtggaaaaaatgtcttggtcagaaacaggagaaagaacatagctatcctagacaaaaataataataataataataataataataatcataaaagcaagggagggagggagaaagggaaagaaagagagacagaaagaaaaaagaaagaaaagacaggaaaggaaagaaaggagggctaggcatattgcctcgtgtctataatcccagcactttgagaggctgaggcagaaggactgcttgagcacaggaggtcaaggctgcagtgagccatgtttgtgctgctgcactctagcataggtaacatagggagaccctgtttcaaaaaaataaaaaataaaaaaaggaggaaaggaagaaaattccagtagaataaagaaaaaaggaaaaagaacaatatttacaagtacctgcagagagaaggtgagaagatgaagacctgttttctacttttttgggcagcactgctaaagaaataaaaaagtacccagaagtcgcaggactctaataaaatggaacatcacctctattcctgcctgttctttggaggagtagaaggtgaggaaatggggaagtgcaggatgagtgattctggagaagacatggctgtgctcatgttgggctgatgatgtcactgataactaaaacaaagggctcagccaggcacccagaagcctcagggccaccgcaccctaaggaccatgcaggctgagacaggactcttttcagtaatccggaagatggctccaccctctctagtccaggccataccctgggccatacccttagcagtgctacccaaaaaagtaaaaaacaggtcttcgtcttctcaacttctctctccaggttcttataaacattgttctttttccttttttctgtattctgttggaatcttcctttctttctttctttccttttttttttttttttctgaagcagggtctccctatttttttccatgccataccctgaaaaaaatctctggggagaggatcccaaagagacaaaggctaattttctcaccatgcttatagattaggggctttgagaaaatgagggtatgtttttaaagtattttaatagtggactgatctattttacctcctggaccagatgaaatgggaactgttccaattcatggagcaaccagacatacatgttcaaayaattatgaaaaacatacaacagatatttatcaacaaatacatcagtaaacaaacttacatgaccctgcttggccatcactgtttcttttcaacacacacacacacatttacaaatacatatatatgtgtgtgtgtgtgtctgtctgtcgatatatatgtgtatatatatatatatatatatatatatatataaataaaataaataggtaagagctgcttatagccctgaatccccacagaaaaccccgtctgtctttagtttcatgaaagcattgtactttttctcattatttttcagaccatcacagacacttctgatcagtgttccacttaagcttagccccaaatacacagaggaattttatactgaaagttaaagaagcgacagtagttagattatctcatgcctcctagattggctggctttgagcactttttcaaagtgtgtaccaactagggtttgtccaccaagttgcaatggcttgtatttgagtcagccatacgtgctcatggataaaaacaataagaactctttattaatataaatatactctgtgaaggcaaagatgtgctttaaaggaaatttctgagcatgtgagaagtagatgagttacatgaggttaggagcatgcagctgtgaccctaaatggggagaatacagccccagggagctgtgatgcacggccactgggaagctaatgaaatgggcagagccaggaccagtggggtagaattaaggcagaagcttccctcttgtgctggacattgtgctggtctctttcctgcccagcacatgccaggtaggaggctataatgtgatcatgggtcattccatgccacaggaatggattggcctgagctggccttcttcataatccaggaataaggagaagaaagaggtaggacagaagatggtcctttatgggggatgagggggatggaggggggaagcttctagaggaattggaattttcacagaaagacatttctgcttagatactaatacagacgtacatatttggacaatatacatgtagaataaaaattatttgaattacttcaacaattatgcctacttttcaaaaggctttgacatcagctatataatttagccatttggcaatattaatcataacttactaaactaaatttgacattgggataacagaatggtaaaatgcaaactgaaatcatagctttatgatcacatgaatttccttcaacagctgttcactgttattactacttatacctttgttagcattccaagaggatctgataatcatagctagcattgattgagcaattattatataccagacattcttctaagtgccattatctcatttaccctacataacaaccttatatggtaagtatcttttcctagtgccttttattgatgacatgaatgaggcacagaaaaaataggtaacttgttcaagtccacacagctagttagtggaagagcaggaattgaatccaggcagggtggtttcaatacttcagtcttagacataataccatattgccttcctggtacaatggatgctttacgtaggaggtgttatagggagaaattcccacattttcctttttatacttgtatattgtttgaatttgtttataataaggatacatctcttttgtaacttgaaaaccacaaagaagaaatagaacaataaccccattcctttaaaaatagcattgcagtagctatttcaggtagtgagatatcaaactggttttaacttttttgtttatttgttttagttttaagaatatccaaacaaagacggatacatgtgaaaacttgggacagtaaaattgtgacctttctataaagacaaagaggtaggaatcaagccaaagtgagattaggataatgtcaggtcttagtactctattctgcataatagtttattttaggtaattctctatattggttggcttgctgaarctggtgtgtgtgtgtgtgtgtgtgtatgcgtgtgtgcgtgtgtgtgtgtgtgtgtgtataaaaaatctttttagtcgttcttttttatttgtgcttctcaacatgcttaagcaagtgatatctttccatataaggggcaaaagaatttggggctgtgaggcaggctgacaaagaggaaatatatcctgtctaagcaagcaagaaaaagggaaaggagtgaaaattcttgcaacatttagctcttccgaaaaaaaaaaaaaagtggtcatgatttctcctatagtagttgatttgtcactttacacaaaaggcctagaaacatatccattatagatatgcctccttggggctcagcctctatctgtcaagtaggggtaatgggtcaatggaattgattatgtgatctataaactttgttccagctttaccatattgtgaattttgaggtttggtcaatgaatatgcaaatccaaccagaagtatcattggatacaaaagtatccgtatcatttttgagaataaaatttccaacagcatttttatatatatcagtgaagatctgtgtcacaaaacaaaactttatgaaataggaaataatctggctgatctttgacagtacaaaatttgacattccaagtcaaattttatgtttaggtagaatagggaagtattggttttgcagttttaccatatcaacacatataatatttctgcatagaaaaacggaccatctaaatgggaaaggggagagccaactagtgggtaaaatgctgtaacagtattttaatgctcaaggcccaattatgacttgaagatgttgttgtactgattagcaatactaactgaaaatttttctaacaggttcataacctaagtattttccagctatatactgttggtctcagggattggcaaagctgaatcagaacacttctttgccaagacttgtctgcaaattcttaacctttttttgtttgccaagaacaaagaaaaattgttgtaaacttagctgctgctgtaacatatgagcagtcttttccgaaaatgcaaattagacaaacaagaatcattacatcatttgcagaaatgcagttacatttggtttctgctattgtgtgtgtatatatatatatgtatatatattactttcatatcttacttgataccttttgtagtgctttaccattttcaaagcacttgcatatgtgtcgtattatttgatcttttctgagatccaaagtttttaacatgcttcatgcttgaaaactttgatacttcaatttatatgatgcatgtaacatacaacaaatgttttgattatggttgtatggaaaattcttattatatccccaaatataggttacacattttggcaaagtaagcagttattgatttttattgccacatgaactggattttcaaatattaccaaatgcatgtgtttttgtttttgtttttaatacaaaaacatcatctaatggatagtgatttatgccagtatgtaggaaataagcaagtattttgggtcaggtggattactgctgaagctttgattaggcttgaaaatttgatacactggaaagctaactgttaccctatagattactaacaaactcattgcttcaaataaaactgttattgattgttcagattaaaaaaataatgtcgacttttgttttagattcagggggtacatgtgtaggtttgttacacaaatatattgcataatgctgaggtttggggtatgaatggtcccatcacccaggtaatgcaagcaacatgattttattcttttttatgactgtgtagtattccatggtgtatacatatcacattttctttatccaatccactgtttatgggcacataggttgagtccatgtctgctattgtgaatagtgctgcaatgaacacgtaagtgtgtgtgtctttttggtagaatgatttattttcctttggatatatacttagtaatggaattgctgtgttgaatagtagttttaagttctttgagaaatttccaaactgcttttcacagtggctgaactaatttagattcccctcaacagtgtataagcattcccttttctccacagcctcgccagcatctattattttttgacttcttttctgactggtgtgaggtggtatctctttgtggttttgaattgcatttctttgatgattagtgatgttgagaatttttttcatacgtttggtagctgcttgtatgtcttcttttgagaagaagtgtctgttcatgtcctttgcccagtttttttgttttgttttgttttgagacagggtctcgctctgtttcccagaccagagtgcagtggtgtgatcagctcactgcagcctcaaattcctggctgaagcaatcctttcacctcagcccccaaatagctggaactacatatgtgtgccaacacacccagctcattaaaaaaaattgtagaaacaaggacacagtatgttgcctgggctggtctcaaacttctgagctcaatgatcctcccaccttagcctccagaagtgttgggattacaggcataagccactatgctcaggcctttgctcactttttaatggggttatttgttttttgtttattgatttaagttctttatagaatcttgatattagacctttgcccactgcttagtttgcaaatattttctcccattctgtaggttgtctgtgtactctgtcaattgtttcttttcctgtgcagaagctcttcagtgtaattaggtcccacttgtcaattttgtttttgttgcaattgcttttgaggacttagccataaattatttgccaaggccaatgtacagaatggtatttcctgggttttcttctaggattttaaaagactgggatcatatgtttaaatatttaattcatcttaatttttgtatatggtgaaaggcagcagtccaatttttcttctgcatatggctagctaattatcccaataccatttattgaataaggagtcatttccccattgcttatttttgtcgactttgtcaaagatccgatggctgtaggtgtgcagctttatttctgggttctttattctgttccattggtctatgtgtctgtttttgtatcattaccatgctgtttttgtatcattaccatgctgtttttgttactgtagccttatagtatagtttgaagttcagtgatatgatgcctctggctttgttctttttgcttaggattgctttagttattcaggctcccttttggatccatatgaattttagaatagcttttctaattctgtgaaaaatgatgttggtagtttggtaagaacagcattgagtctatagattgctttgggaaatacggccattttaatgatattaattcttccaatccatgaacatggaatgtttttccatttgcttgtgtcatctgtttgtttctttcagcaatgttttatagttctctttgtaggtatcttccatctccttgcttagatttattcctaggaattttaacttttgtgtggctattataaatggcattgcattcttgatttggctctcagcttgctgactgttcagattattgttttataaaagccacaaaaatgttccattagctaaaagtcacgtttcttagttaatagaagtcatagtacataagaaggtaagagtgtcaaattattactagttgtgaatgaattattactagttgtgaaagaatagcaattcatggttttgtttggtcagcaactactgcaccctagtgatgatgaattctctagcagattggaaagatacttagggagggaaaaaagatgactttattaaggatctctggaaataggaaaatatttaagaaattctataagtaaaaatgagtaattttatgtcagaataaaataaaatttggctgaatttatagttctccatctgcctgcttgcacctatttggggcttattttacctttgtggttaccctgagaagcatggtatggctggagcctaagtgagttctttgttttccaaccacattgtcctcttttctttttataaaatacatcaaattccttgcaggtttgtctgtctggagtacttacccaccttctttacttagtaaagtactacttcttttttaggtgtccatttaagttcaaatccttgaagaacttttattttgtaataaagattagattcatatctcctgttaaacactcttatagtattcaggatataccttctaagtggtacatgtggggcggccagcagaagaagattttgtattaggtatcacatttgagaggaaggaggccccgtggaaaaagcttcatcaaaagaaaacaaaagaggtgtttatatgtttctcaaaaggcatgtatctatgtgttggtgaaaactgccttaataagtattacatgtctaatgtgtgtatactaacatgcagctctacgaaatatacaaaaaagttaagcatatagcctatgcttttgaaagcttgagatatatttgngggaagtaactatgaaggggatgtcccatgtagcctcatatggagcataaaataatgaaatgctatttattatatgtcatgtatgggactggcctgtatggggtcatttgagtgctaagacaagatttctttaatttgcagtactttcccacaatattcatatgagttaatacattatacttaggaaattgcccctaagataattaaattaaaaatatattaccatattaacatgtaaacacaaattggtttaaatgttctctagcaaagatcaaatctaggacagagaaacaggagaagaaaacaggaaaatggggctcagagcaggggaatgctgtgttgtttaaaagccctggatgtcaagatctaaggaaaagataaaaaaaatagaaccaccaccaaatataaatatttatttccatatctcacaattttttcctaggccattgctggtgacagactttccagtccttttcagaacttactcatcacatccttttcatgcttgttattttgatcctgaacatccttgcaattcaaagagcatacagaggcagagtgaaattagcataatgtcacctattgctatgatgctcgttacctctacctccagaacatgccaaggaggcttccaggagccccagaaacacagaacagcaaatcttcaaaagcccagtgcccagagcagatagagaagaaaattctattttgaaatccataaagaatctcataattccttgcaatatctagtcccaattgtgtgggtgacaaactgacctatggcagaattaggaatgtgaataggaatgaggcttggagttccccattcctgctgccctaactcccactggaatgtaatttgtacaaagagtgacgacatgtgaagatgtaaaaaagaggactagagatgtcctcctgagctgcacaaggaagaaagctttttatgaccatccaattctgcaaaggacctagtttcccagtgcttattaccataaggatgcagaaagaaaaaagttcacagacataagatttcatgtgaaaaccaagaaaaaaaggttactgtattttttaaaggaatagcatttgatttggtgtaatggcaggataaagaaatgagaaataacagtggggaaaaaagttgactacaaagatgtgaataagatcagatggcatagtaattttattcgtaattaaaaatctggttcagttaatggagagatttaatttcaggagcattaactagtagactactggatacaatgtacatgtttaaataaatcataaataagtttctcctaagagctactttaatgttgtagcattctaactaatgagtagtatgacaaaattacgttgttattataatagcaatgtatcagtttttctgttgatgaaatttcttagggttagaatttttttttaccagatatgaaatagacttacacttaaatactgttgaaagttgccatataatgtggctattatcttggagttaattaaagttaatttagttttgagcattattaagctctttaagaaaactggaagacatcaaattcttataaaggaaagcaggacctatttgttaaaacaaaaagaaatagctctgtattcaagagtagttttctcaatggatactttgcccgtaaacattaaaactcactaacacttaaaataaatagatttgaatggatggctcttaccacaagttaaaggttgttatttcattaagctaaatgtagtacgtataactgatttttttttttgagggaggaggcattaccttggagaaggaaatggcttcagataacatctatgaaaataataataataataataatgagattatacgcaagatttgaaacattttcagagttggatagaaatttacacaaaccagatttcccctgggagatcctaagataaactaacaataatgtcacacacatatcctgttattttatttactaaattctaaattaaatttctgctctggtgctatgaaggtcacccagcgtactcttttagataatacaggagattccaggattgaaccaaaaccaagctaagcagaatattttccttccgagagatttgaaatttgtgataaacacgtttgattttttgtgtgacattatttggtaaaagtaactttttcagaagctcccccaaatctctatacccttctttgtgccaccgtgttttcttgtgtattggaggtggataagcaaactgcaattgggatagattttcacctaaatttctcacattttcataagtgttctgttcctcttatttactgcttgcaatccacatgtgtatactgcacacacactcacacacatatacacacacataccctcatattctaaagaataaaaacacaggcactgtaattgcatatgtgtatacttagggggttaaagcctggcttcaccactcagtgctggtgtgaacttggagagcttacttagctcaggtccttttgttttcttctgttgtttgtttttgagacagggtctcactctgttgcccaggctagagtgcagtggctcagatttcagctcactgcagcctccaaattccgggcttaagtaatactcccacttctgcctgtagctggtaccacaggcacgtgccaccttgtccagctactttttttttttttttggtagaaacagggtcttgccatgttgcccaggctggtctcgaactcctgggctcaagggatccacccgcctcggcttctcaaagagctgggattacaggcatgagccactgcatccagcctagcccaggttctttacctgtacaatggggataagagtactgatatcacagggtggttgtgaaattaaaatgagatatgtagagatatgtaaagctcttactaaagtgccagcaatataggaaagaacaacaaatgacatttactctttttatgttgtctaaagtcatatgagtatatagtgaagttttcagcataggctctgtgtgagaatacagtagtccccccttctttacagttttgcttttggcagtttcagttatctgcaatcaactgcagtctgaaaatattagataaaaaatcccagaaataaacaatttctaagttttaacttgtgcactattctgagtagagtgaaatctcgcccatcctgttctgtccctctggggacatgaatcctctctttgtccaggggatctatgctgtctacactccccaccctttagtcacttagtaaccatcttgatgatcagattaactgtcacaatgtagcagtgcctgtgtttaagcaacccttcatgtaatcatagccccaaagtacaagagtagtgacatcaacatgttattattattattgttcttttttattattaagtattgttgctaatctcttactgtgactaatttataaactaaacttgatcataggtatgcacgtataggtaaaaaatagtatatatagggtttggtactatccatggtttctggcatccactggggatcttggaacatattccttgtggataacggggaccactgtagaggcaaatggatatagaatatcctttaggtttatttttttgtctgtctttccctaaagcaataaatataaagaaaatctaaatagttggttttgacaacacataggtgtattatattctgcctttttagtgctcagtattccaatatttcattttgtagatgtgaaaattaaggtaatcaagggtggaaatgcttattggagatcatggaactggctcgtgatgcaacagtcatggagtgctggtttaaccgagttgaatacaacacgaatgcccccatgaaaagcaatgaatacagaagtgctcaaaagagtttacctaagaaaataaataggaagaataaaactcaaagacagagaaggtatattaatattcattatcactgaagagaagtaaacttaattttttaatattataagttaatgacctcaagcaaagtcagatattgaaaggtgatcgtttcaaagattgaaactgagtgaaaatatttcaggaaaagagagttttagctattcttaaagaaagagaaaaaagcagattcaaggatagctttttgaagaagatacagcttgaaatggcttcttttactccctcagttaaaagtggtaatggatgtgcctaactaaaattcccacaggaaaaacttctttagttcacctctctcttcctgctttttttagttgatttcctatgtaaatatgagagctcttaataaaaatatgacagaaagttggaaagagttttcctgaaataaataccagatgagtatagtggttacttgaattatgtgcagtaaaagaagatgatactctacaagctcggcttttcggcgacaaatctgaagtccatctccattgtgagtatttacttgtgtggcttggacttcctccattccagagaaagaatcagtcctttgggaatccatgaagtgtgtcctactgtgccaggcctcagccactaacacaggtccctagagagccacgctgtcttgctccatgacctccaatgagaaccccttcttactgccctttcattgattaaaacgagacatttgctgggacctcattgtgggctaagcacattgcagtcagtttccacataatgttgctcattggatcattattttaatttttctctctttacctcccccacagctgtctttccttatctgcaatgttgcatgcacaatatttactttcagcaaatgatgtaaatcacccttgaatgaaaagactgaaggtgcctcacctttcttcttcctgtcctattactgtgttctcatggccttggattttctctggataaccacgtatcctagttcatgcttttgtgtcataaggaaaagttggcactcccttttgaaaagctaaacttcccttcctgctattcatcctgacatttctgccctttattaggaacttgattcaacaattttctcttctcttatatcttcaatttctccctttcttgtttctttcctttaggcttaaaaatgtctttaacatccttaggtctttcctattgttaaaaacaagcaaactcagaatccttttctcaaacttaatactttgttgagttggcacccaatttgcctttttttttttttttgagacagggtctggctttgtcacctaggctggactgcagtggtgccatcatagctcactgcagcctcaaactcctgggctcaggtgatcctcccacctagcctgagtagctaggactataggtgcccaccaccacatctggctaatttttgaatttttcatagatatggagtttcaatatgttgtccaggctggtcttgatctcctgtgctaaaacgatcctccaccctcagcctcccaaagaagtgctaggattacaggcatgagtccacgcccagcccttaatttgtctatttttattgttaagtttctcaaagaaatgctcaatgcctgggtcaaggacctctacagatcttgagtctccttaggacatccctttccaactactcatctatttgatgccagattttctacatgtacttcaaccaaaacaacatattgcaacagattgaatgcagaagcagatatgagaatctgctgccttctatgaagcaagacattaaagagatttgcaaaaatgtaaaccagtgctctcttcttttcaaaattatttttattagggaaaatatatttttcataaaaactaggttatttatattactatttaatggagttagcgttgctatttttaaaagagtttatttaaaaagtcttaacttctttagtggtaatttctagtacggtaaacactggtagatttaacccacagaatcagaagctctttgggggtcctcagtaattttaatagtgaaaaggagttttaaaataaaagtagttgacactttatgaggctgaggcaggtggattgcttgaggtcaggagttcaagaccagcctgaccaacatggtgaaaccccgcctctactaaaaacacaaaaattagttgggcatggtggcacgtgcctgtaatcccagctacttgagaggctgaggcaggagaatcacttgaacctaggaggcagaagtgagcgagatcatgccactgcactccagcctgggagacagagtgaggctctgtctctgaataactaactaactaactaactaaataaataaataaaaataggagttgcaaacagtaggtctatatccgtgattgcttttcctcaccactgttgcctcctttttttaaatctctgaccaaagaactggctccacttggtgtcctgtatcagatttcttgggccggccatggtggctcattcctgtaattccagcactttgagaggctgaggcaggaggattgtttgagctcaggagttcaagaccagcccgggcaacatggcgaaactctgtttctataaaaaacacaaaaattagctcagtgtggtggcatgtgcctgtagtcccagatacttgagaggctgaggtgggaggattgcttgagcctagagggtggaggttgcagtatgccagaccttctagatacaagcaagcctcttaccttagcttcctgagtggctgtgatttccctagtcttttatcctccctagttgctaagcaatgtttaacagtgcctacctctcatttcttcttgatattctttccttctacggcaacaaattcccctgatttcttcccaaccttcctgactacccatctttttctctcttggttcctttttcctgggactgtattttcctcttagctgactcagtatgcttttccttaaagattttttttttctattgcccttccaaaattttttctagatccaaagcctttctcacagtgtcaagaaaaaaacattccagttgccagatgaacagcctgtttcagtatcatgggtctaaaaccagacaccggtttttcctccagcaattcttctggttaacttgatgcctctgtctatcatggaaaccgaatttcctaagtcatgcggatttaaaatgctagaaaatttcttactcctgtcaccactacatctaatgaatcagatgttctgtttgttcttgtgtcatcccagtccactccctgacaaagcatatctgcaagcttatcatcataaacctaggctatttcaatgctcacgtattaaccgctcatcacatgaatagaatttcatttgcctgatttaccctacacagcccttcaaatttatcaacgaaatcactggttttcaacttttatttttaagtaggaaaagcttttccgttaagtttttgcaaacaaatataatgcaatccaatatttgccctccagagctatgccgatttaccgctgaaaccttgagcaaagaaatactcaaagcttcttctaggttgtgtatgtatcacaacagaggaaggaaattatgagatgggcacttgggagactgttttcttggttgccctctccttgtgaaaggtagggctacaagcccccatttgagccaaagctaaggagtccggtgcccatgaaaaagacgcaagcaatgctgtcctccttgatggaggctgcagaggccagaaccacacctgctcagcctggccctgaggctgcccctgtggcactgctgaaagtcagtcttttgtcacaaggaaggcagtttttctagacaagattattctcatcttaagcatgaggtaggggtgtgtgtgtgtgtgtgtgtgtgtgtgtgtgtgtgtgtagtgtctaagtctacttgcctgctttctgggaactggtaagagataggaagatagaagtcatcatcattccaaatgtaggctttcacttaatttttctattttcagtctgagaccacacatttacacgtctctcagcctgcatccccaagctcaaaatatttctgctttaatctcttcagagactaaacctcctgtcccccactacatggagaaggcttggttacctgttattcaaggtgttgcctggatctgtgtatatactttaattcattccctctgttttcagcaccaacacccgccccctttcctcctagcttccttggtacttggtgcctccaatttttgaggctttctataattacttagcacaaatcaactttcttgttgattttcttctttataggagcatagatttcagcatttgtgactttgacaagtcagttgttacaaattcatcagctgcccatctgataaaattttaatgtcttttctactctatctcttctagcttttcttttcttgtgtgtcgatacccattttatttctttacttaccctcattttagtggcatttcaaaaggcgtactagttacctattgctatataacaaattaccataaacttagttgcttaaaacaatgcacatttattctcttagagtttctgtgggccaaggtactgggtgtagctcagcttggccccctactttagagtctctcacaaggctgcagtgaggtgctggccaagactgggatctcatgggaaggctcaaaaggaaaagcatctgcttgtatgctcctggagttacaggcaggttttagttcctgatgagctgatgaactgacagtcttgttctttagtgactctgggccagaggtcaccctcatcccttgccacatggctctctctctatagcagtttgtttaatcaaagctagcaatggtgagaatctgccaacaaaatagaagtcactattttgtgtgacataatcacagaaatgacatctcatcatgtttgccacattctattggctaaaagcaagtcaccaggcccgcccatactcaaagtgaggagattatacaaggcgtaaataccaagaggcagattagaggctattttagtctgttgatataggaggccaaggtgataaacacatgggtccaagtctctctctaaaactggagtcccctctctctcacttccatcaagcttacagtccacttctcctgtcaaggtcaagtagtgacctccatcttgcacaatccagtgaactatcccaagtgatcatcatactcaaacaaacaaccagtagcaactgacatattctcttcctgaggcattttatttctttggatttggggatccctcacctccttgtcttttcccttcatctcttgtctctgactcacaggctcctttgttcattctcatttttcttccttttggagggctaaatgctagaggtctacagggctccatttgtagcccttcactcttctgtaattgtacctaagaaatctagtctcatgacttcatagtccatgtatatattgatgactcttacatttatatctccagctccaacctttcccctatgccccagatagtacccaattggcatctgtacttggactcaaagacattgcaaacttaatttctcaaagaattaaaaatagaactaccattcgatccagcaatcccactacttggcatctactcaaaggaaaagaaatcattatatcaaaaagatacccccacttatatgtttattgcagcactactcacaaagggcaaaaacatggaatcaacctaagtgtccatcaatggattggataaagaaaacgtaatatatatacatacacatacaacacacacagacacacaccgtggaatactactaagccataaaaaataaaatcatgtcttttgcagcaacatggatggaactggaggccattatcttaagtgagataacccagaaacagaaagtcaaatattacatgttctctacttataagtgggagctaaatatgtgtaccatggatatagaaattggaataatagacattggagactcataaagttgggagggtgggaagggttcaagggatgagaaattacttaatgggtcaatatacactaaaagctcagatttcatcgctattcagtatatcagtataacaacaaaactgcacttgtaccttctaaatctatacaaataaaagctaaaaaatgaaaacaaattagacatctcaaatgacaacttaatgcagaactcttgatttcctcatccttccctgacctttacctaaaaacacactctgcccaaactgatgcccatttcaataaatgtcactaccttccacccagttgcttaggtggaaatccaggcattttctttgttcctcttctttttttcacaccccacatacacttctcactcagcatatcctgacagcgccaccttcagaatatgtccattatccaaccgcttctccccagttctcctgcaatcacccaggcgtggtcatggttgtctcttgcctccccttgactggtacatgtgccgttcccctttgcatcaagcttacatctgctccaggatgtttatatttgcagttctctccacctgtaattcttatccttctgatttgcatgtaactcactcctttttatcatccaggtctctccttaaataccacctctttggaaagccttccttgatcactctgtgtaaaatagccaagcctccgttattcactatcttcttttgctcttttatttttcatatatgactacgtgaaagtactgtctgttgttatatgtctagttacttgttatgtgagtataagcttaatcaaggtgatgctttattgcacttagcgctgtttccctgcaatccagtacaaagcccagtatgcaagttataggcatgtggtaagtgttggatatgtgcaccagttgttggacaggattgaacttgcgaggtcagctttctcaggtgacctcaaaggcaagcatctagtttattgagtagtacaacaataggtatgttgcatgtacatatatgtataacagaagtttatttttaagcctgaattagtgatagcaactctgttcatgagtgattatgtggttctttttcatctttactctttctcagagaaattcttctcttcttcccacattgtttgactgcttagagtagataatagaggagtggtaagatgtctgagtatataatgtaagggggtttggttcttgtcatatatagaatacatataggtcctattataaacaacatatggttcttctcatatatagaatacatacaggtcctattaaaaacaacatattgtagctttaattcaacacacgactggttcttgtataaagtttcactgagatctttattgtggagaattgcatgactattccagtcctggactcaatttgaataaaaacataggaaccaaattcctccactaaataactgattgatacttaaatttgacaacgatagctttatagaatagtccagaacatatacagtcgtacctcacttaacaatgtggctacgttctgagaaatgtgtcattaggcaattcccgtcattgtgtgaacatcatagggtatatttacacaaacctagatggtatagttcactacacacctaggctatgtggtacagcctattgctccttgactgcaaatccatacagcctgctactatactgaacactgtaggcaattgtaacacaaaggtatttatgcatctaaacatatctaaacatagaaaaggtacagaaaaatgcagtatagaaaataaaatatggtacacctatgtagagcacttctcacgaatggagcttgcaggactggaagttgctctgggtgtcagtgagtgagtggtaagtgaccgtgaaggcccaggacattactgtatacggctatagactttataaacattcttcacataggctgcactaaatatgtattaacaatttttctttcttccaaaattaacctaattactatatcttttcactttataaacttgtattttttaaaccttttgacttttgttatacttactttaaaacacagacacattgtacagctgtgcaaaaatattctttcttcatattcttattctataagctttttctgttttaaagttattattaattattattattttactttttaaacatttttgttaaaagcacacattaaacacacacacacattatcctaggcctacacaggatcaggataatcaatatcactgtcctccacctccacatcatgtcccattggaaaaagtccagggacagtaacacacacggagctgtcactttctgtgataacaatactttcttctggatacctcctgaaggaactgcctgaggctgttttacagttaactttttttcagataagtagaaggagtgcacttaaaagaacaataaaaaggatagtaaatacatagaccagtaacatagtcatttagtgtcattatcaagtattatgtactgtgcataattgcacggactagccctttataccactggcaggacagtaggtttgtttacaccagcaacaccacaaacacgagtaatgtgttgtgctacaatgtcactaggtgataggaattttttagctccattataatccttttttttttcttttttttgaggcggagtctcactctgtcgcccaggctggagtgcagtggtgctatctcggctcactgcaaggtccgcctcccgggttcatgccattctcctgcctcagcctcccgagtagctgggactacaggtgcccgccaccacgcccggctaattttttgtattatttgtagagacggggtttcaccgtgttagccaggatggtctcgatctcctgaccttgtgatccgcccgcctcggcctcccaaagtgctgggattacaggcgtgagccaccgcgcccagccagctccattataatcttatgggaccactgtcatatatgtggtccacggtttagagtatggaaatgactctatttccatacagtacttccaataataaattaagttgtttgatttctagattgaaaatggctttgataatcttgtaattggatttatatgcctttgagtctctcaagtagaactgatttacctttccattcctttctctttcctctctggtcacatccctattccacatttgttttttttgtaaccagatacacaaataatactttgtattaagtggttatagtgaaagctgggcattctgttctagtgaataatgattcttatattccaaggacaaactacctattaataataattgggtattcggggcttaaaagttgtatttgaaagatgcagccaggtgtggtggctcacgcctgtaatcctagcactttgtaaggctgaggcaggcagataatctgaggtcaggagttcaagaccagcctgaccaacatggtgacacctcatctctattaaaaaagaaaatacaaaaattagccagacatggtgggaagcacctgtaattccagctacttgggaggctaaggcaggagaattgcttgaacctgggaggcagaggttgcagtgagcagagactataccactgcactccaggcatgggtggcagaatgagactccatcagaaagaaagaaaggaaagaaagaaagagagacagagagagaaggagagaaggagagaaaagagagaaaagaaagaaagagatgttatccatgatttagtggaaatgagaaaacctagaaaataccatgcaattctaatgaaaattctagaaaactagaaaaaaggaaagagaaggaaattgagaagaccctgtaatctgttgaaatgctgagttttcctaattaaggaaagtaaaattctagtcacttaaaatgcctccaagaaagtcactgtttttgtccatttatatctttctgctttctttttcattttttccctaaaaattaattaaatattaattacttttagaggaaagattactctgataaaatggtcaagaaaagcaaagtttcttactttctgtgccaaagattttcagccaaagtaataaaagaaaaatcttaaaaagggaaactatgcaattcgaatggaagatccattttaaaaagttattgtggcagtataaaatgatactgtgtgctcaaatacctaaaaacttttgcaacttacgaaatggtatttttagtattacttagggtgttgtatgggtgtcttatgtaacttgttaaggtaaagaattttgctattctcaacttcagtttatgcatctataaaatgagaaagcgcaaaataatacttctacctcatagggttatcgtgaaagttaaatgacagagggataaatgaaatatttagtatagtgcctaccacaaaagccaaagctaaataagtgatagccaagaacaaacacagaaaacttcctaaataaaaatatgactagaataactgcaatgtatggaccaacataagcatgtttaagagtgaacacaggtgctattagtaattacacctggaccaaaagtataacccaggatgctccctgacatactagaatttatggtttctctatctataatctattaacatagcaggcagtaaaccttctcttttgtggagaccacacatgcaccagacaagcagagcctggattcaatagtgtgccagtaactcacccagattttcaagaagtaatatttactgggattatggattaatcagagcttgtgtttaccaaagtaaagttcaccaatgattcttcaaatatgttcacaagctaacttggcttatatccatttacttataaatcagaagattccccaagattttactgtctgcctgattaaagctagtatgtgctataagtgttttcaaaatacttttttccaaaactgtccttgcagttaaggtgctgttaattcaaagtacctatgacttcctatcagaaatgaaaatgacacttaatgagaacaaaacatgttttcacttgaaatgcaattaaaccaaattagagaaacagtgtttttctaactaagataaaaacagctgtgtttatgaagctgctctaatggtattagaatttctcttatggaaacttttgctttatttaagatatatgatttttattttaattgacattttagacaatgatactttcattacaattttttcagtcaagtatttctttagggaatctttcctataattcatagtgagctaatttgatcatgtattaatagagatttcatggagatttgtttttaaaggtttttatgtgaaacctttaaaaggcctcccaacaaaaactttacttcatgactagatatgatttaatcatgattatgtcaaaattgtaatttttaaaatgccttaagaaaaataatttctgcatacatttgtgtaatttttctaaaatgcaaaatttgtaacaatttctaaggtgtagaaaaaacatttacttaagttgctggtttttttaatattcatgtgtatgttttgggattttgtagatataacctatgccttagattactacatgttgatgtgacttgctgatgtttcaccaaaaaaaaaagaatgcttccatttctacacttaacatttttttctttatctttcataattacggtccataacacttggagtaacaacatgttttcctgtgtatatataatataaatggttatatacaaacaatagaagaaatacgcaatttcccaaaatgataacatttgaagacgtcattaccaacaacaacatcactagaaacattactgctgttaagagcttgatctagaaaatataagcttaaactgctctgtttggaaacagcatgtaatcgggatatttaactagaaattcaagtacaataaaatggatttaattagttatgtagctataaaataccttaaatttttttaggctatgtctgcatgggcaactacttaaatgtttttagattaatttattttagtcaatttaattttaataattacctcaactatatgttattttcttcctttaaataatcacagaacacgctgttttaggatcaggtagaagctgagacaatctcttttgaacaaattttatttttattccaaaattaattgtcctaaaaatagtacatttagccatgaaaaagagaaaacaagtaaacctatcaaaatgggacactgttaattaactaaacatagaaaatagattcattcattatccaccaaaaatttcaatgtacctgccaggtaaaagcaccatattcagtaccatgaaagtgataacgattccaataacagaacatcttccctcaaagaacttatcacatgtttatgtataagtttaaatgcattgaatgtcaaaaatgcagatagcgctttgatcaaggacattttagcaatgtattcagacaggatctttattttctagggttttcattataaggcagaaaggttagactaaagagtaatgttaaaaatacaaattatttttgtattctagacatttctataagaaatgtatggaaatagaactgtaattttggcagtttttgtcacagtgtcagtgagcaaatagatgtcatactcatgagtacagaaagaggacattctctttaacagccacatacttcttacccagaaacccttggagaagatttataaacccacatactcagaatatggtaatgaggaaatgctgtctgccctgggaaggggaagaggatctaaaacatttaggacaggtaattccacaaccatgccttaagataaatccatgccttgaaaagtaaaaagaacagcaaaaacagctagttagtcaaaggtcaagatagcaaaccctagctggtaaacttgtctgaatctttactgtattcctcaagctataaactatgtttatagactccttcaaacaggattaaattttggaggcattttcttaaaaaaatagtaaatccccactgtaaaattagttataggctttggacaggattcttgccaatggggctcagaggcttaagttttattaatttcacagtaactccaccttagttcacagatattttcaaaacatggaaagtgtgattgaagtcaggtaagtctaatcaaatatgagttctggtgccacagaacggtgatgttgaaatacttggcttttattggctatttatggcttttattggcatattaatgtcttttactgatgatctcaagttctgtctatagaaacactgatgtctgattgtaacagtttaatcaatgtataaaccaatctggatggttcagatctcaattccaacgtttcctttagaattcaggctcaatttatctaaattgggctcattatattattattaattttactttggctgtgggctgagttaaagcacactatgtttttgagcattctaagattgttccaggatttaaaaatttaagattactttggtttcttggaattatttaatacacactgcaattttccctgaaaaacacatgtaagctaaaatggctctatggaaatgttttatgttttaatgaggttgggaaacagagataaattcacctggtcataatcatatggtaaatattgatgaaaggaacctttttytaaactgcatagctataattctattccagctgattttgtagatttaaaatattttaccctgtttttgtgtctcttaaggagtttctgtttgggttatttgtacagatcaacagataaaaacttatgtcctagaacaaaaacagcacacttaaacacatcttttctttcaggccaaaaagtttgctgtttcaggaccatggacctccttaggaacatgtacatatttccctaatgaatccttaggctgtgatatgttttcgagttaaattgttattactgatagaaaagttctttatgtctgccataaatgtgcattaaagtttatatagcattcaccttcatgattggtgttttatcttactgattattttggcagagaacaaataccaaaagtctccccatgagaaataaaaacaaaccacgaccctctaaaaatagaaaaaaagccacaactcttcaggtcctccttggacccatggacaaggctcataaacctccttggtgtccattccatgttctgtgaatctggctgatggtcaaagaaagggctagagacaggatgatctacaaatagaggagattgaatttccaaatgaggtttgatcatctgctctttgtgaattttttccaattgcttccccatgtgccttggtttagcctttcaaaaaattagaattttatacccctaggatgtaaaataccatgtcagcgcactttttgtgcctggaatgcaccttggagatagccttgcccattgaccagctcttcatttttcagagggagaagaaagtgaggtctgggaaagtaaaatgcctgcccaaatccacagagctaagaagtagcagagcagagatcattaccacacattccaaactttcttcctatttatcatttttctccttgagccccttcttgtctgagacactacatcaattaaaattattttataactgcaacatcgtacaattgccatgtaacacattgcccaatgcaattcaatcttagcatctggaaacaatactcatttattaactcacactttgtaggtcagaagtctgagcacagcatagcaaagtcctgttcttagggtctcaccaggctgaaatcaaggtgttgaccgggccgtctcctaatctggagtgtggagtcctcttccaagtccattcaggttgttggcaggattaattcgttgtagctgtaggactgaagtctcttttcttgctagctgtcagccaggggcagctccaagctctcagacgctgccctcaggtcttagatgtgtggccctctcactatacgacagctacttcttcaaagccaataggagaatatttctcttcaggaaaggttcactccctttttaaggactctgctgatgaggtcagacccactcaagacaatctccctcttgattagctcaaagccaaccgactaacaactagtcaagagtggtatcccatcatagtcgtaattctcacttgtgctcaaaggggaggggatcatacagcatgtgtgtaccaggggacaggagtcttgggagtcatcttagaattctgtttgttgggccgagcgcggtggctcatgcctgtaatcccagcactttgggaggccgaggcaggtggatcacgagatcagaagatcgagaccatcctggctaacacggtgaaaccccttctctactaaaaaaatacaaaaaattagccgggtgtggtggtgggtgcctgtagtcccagctactcgggaggctgaggcagaagaatggtgtgtgcccttcgaccgaacttcgcgctcagcttacgtgccacactgccctccagcctgggcgatggagcaagactccgattcaaaaaaaaaaaaaaaaaaaaaaaaaatataccgtttgtcggccaagtgcaggttctcacgcctgtaatcccagcattttgggagaccagcctggccaacatggtgaaatcccatctctactaaaaatacaaaaattggccggatgtaatggcgcatgccaactactcgggaggctgaggcaggaaaattgcttgaacctgggaggtggaggttgcagtgatcccagatcgcgccactgcattccatcctcagtggcacagtgagactccatctcaaaaaaaaaaaaaaaaaaaaaaaaagaattctgtttgtcacgttggtctgattctactcattcaagtactagatttccttttgcctcctcttaccttctgctgccccccaactgagttggttcattgtcttccatcctacagaaatccagaaagggatgataagagaaggtaaattcagactagggtgacgaaaactccaaatccatgaacatatggcatttttattgggttcatgtattctttgcagctgtaagggcattggccagggataattcagaattaccttttcactaattactgaatagtaaaatttacctattctttgggcatgaagcttcttttaatacggctggcctggattcagagatgtctggggacacctgtgctgggttggcaggagcagcagcagctggaagtcaggggagagtggcaactaaagacctgccattttcttagtgcctatgcaggctgagactttactttcatgagctcatttaatcttcacaatggtgactgatacagtcaatattataatcctcattttacagatgaggaaatagcagagatgcagcagagtcagagttcaaagctcggtcagatacaccagtgctttttcaaggacaggcttctccttctcaggttttggttactcttgttttcttttttcttttttgagacagagtctcgctctgttgcccaggctggagtgcaggggcgagatctcagttcactgcaacctccgcctcctgggttcaagtgattctcctccctcagcctccggagtagctgggataacaagcacgcgccaccatgaccacctaatttttgtatttttagtagagacagggtttcatcatgttggtcaggctgggctggaactcctgacctcaagtgatccacctgcctcggcctcctaaaatgctgggattacaggtgtgagccactgcgctcagctgagacagtgaccctctgagggtctcagcatatttaggcagagattgggggatggcggagggagctactgagtgacaggcaccctctgagagggagcctatctcaagcaatcaaaaaatatcaactatatgtagggactctttctcccttcaagagttacaattaaacttttcagaaatcaagatcaaggctatagatgataaaaattttattcctaaaggaatttatagacaagaaattgattgaaccttataataccccatgatggttcatgagaaacacgtgttcatatgattataccatgtttttaaatatggggaaataaagcacagagtaggtgaatgtgaatttagggacatcaaaatgtaatgacaaaaatcagctaggcttgttcttgaatccctcaaactgtaacttttggctgaacaaatgaattaagatatagctaatacagctgcagagcttggaaaagttacagttgctttgttaaagtatattgagttggagtaaaaagttctatttggaaagatttcaaaacccttcaatggcagcccaatcattccgaagctgaattaaatgtaaattgtgaattatctgcatacgtttatagtctattcattttaatatacatacggtggttgtgtactttaagaagataaaaagatgattcctgaggcatcattactgcatggcagagagacaaacttgaaaacaagtaattataataatgcaagtgttaaactgaagatacagagaaggaatacacatattccacagtcactggttccctttgggaacatcaggaaaaaacagaagaggaaagttttgagttgggtctggaagaatggaactttagcaggcagaaaaggagaagaaaattccaagtggtaagaaaaacacagttaaaatcatagaggcaagaaaatataagaggctagaaaaccatagttcagtgtggccagggtgcccacaatgcacaggagaagatagaaaagagattgtttatgcagcaatgagattggaaaggacctggctgccctctaaggagaagtttctattttatagcagcaggaatctaatagagacgttacacgaaggaatgacaagataatcgctctattttagaagattaactctggtagcaggagctgggatggctgggggtgtgaactgaaactgacgctgcataagaagagaatttacaagcccagtcaaagaatgaggaagaggacccaggtcagggaagaagcaagacaggcgatgagaataaaggctgcttcagaggtgaacactgtagaattgggggcaccaggtggctggaggcaggtgagaagaaaaggaagatgtaaagagaaaaatgaaggatgatgcctagtttctgatcctgagctctgtctggctttttttgcggggaagagatggagattaatgaattgtctttgggcatgtttagtttcaggtacttggaaatacaggcttgcagtttagaaaacaacttacagctgtagataaacatttacgaattatcaacatttgaggtagtggcaagtaaatgatgtttttatagaattatcatgtagttaagaagaaaacagttttaaatattggaccatgggccagcatttaagagaaagttaaggaaaaaaaaaagatttaagaaaaagacacacagaaagtcatgccactgagattttactatgagtcccaggcaaaggttttaagatgagtgtatcaatgtcccctaggcataaaaaggattaaaaagagaagagttcagatgacaatttggaaggcactggtaaactttgagcagtttaattagattggtggagagttggagacgagacagagtccttgaactgataaacaaaaaaaatctgagagtatttggtagtgaaagtaaaggaagggtcaaaagaaaggttttgttgttgttgttgttgttgttatggtttcttcgatagaaaggggaaagataatggttaattggggtaacccagcagtagagattggcagggcaggtaaaccggcaggataaaggaaggagagtatggattagattttaataaaagtttcttagggaagaggggaagaaggaaaaaaaatgagttgagaaaatatatattaaattctttacattgtgcttctgagacagagctatatttagcacccataataaatatatctgataagaatcctagtatgttgctgactctcagcactctgcttattattatgaaaataaaaatgacttccatgtcattctgtcagactatcttttggaaaaaacaacgacaacaaaaataaaaatgtcattcaatccgaaagcaagagaaaagacaccttagtaaaagtaactttcttcttccacctacaaaaccagaacttgaagacacaaatctcaggtgtactgaaataatttttttgtgcctggatataactgctttatgggatcacagagacttcagtacacactctgggacaaacagattattcacaaatgatgatccaaacatattctaggcattcaattgaataaggcccaggatcacccccagaatttttctctgggcgccaaagaatcctacatgctgaataagaccctaggcaagaccagagctccctgcaccatttgaattaggtagtttccatcttgcacctatgggaaagagttggagccaacccaatctttatgattaggcaggaaaaacaacattttccataagaatgtaatcttctgcatggttggtcaccagttatttgttggacatccatttggtttctgccaagttagctaattgttctgctaaatcatctttaaaagatgacttgccttcttgagttgttaatacttgtgaaattcttttcccaaatgaatgagaattgaaagacatagattcttttaacacacacatacacaaaattcccaaacatatagtgtgttgaaagttagtctgttgcaaagaaacttgagttctaggcccggatccaggggtggagatgactgtaacattccaccaagaacttcactcttggctttcacctcgaaactaaaaatccctagttaagtcagatatatgaagtattgcactctaacatgaggaggaactgaagaaaagggaggatgttttcataaagatttagtgaggaagttagaaggaattatgtgtgaaagaaggaaaaagagtaattgtggtattattacaatacatgcctgggccaggtacagaatatgatgggtccgtgtttcactccatacagccctgttatcatgatgacattatgaagtaatttcctatatactataatctgttttggaaatgctttctaccaggtgtctcttatggaacatacaggaaaaaaaaaaaaagagttgacctattaaattactctcgctgttcaaatatttgaagtactaattcatcactcatgacattcaatttatattttaacatcattataaatttaacagggttgaatctttcaaaataacaaagaaagtgccttttgaaaggaaagaagataggaacgttgaagaggttcttgtgggatcactcttaaaagccatcaaagcatctgaatctctctcttggctgtataataaatattcacagaaaatgaccgccaagtatgtatggagaaatgccttggcatttgctgtatgaatatggatgatgggaatatagtaaaatattagagagattaaatcgaaactcaaagatagttctaaggtgtttactgggtgtcacttgatgaaatgactctatggggatttatcactaatctgtgaagtgaaaaataatcttaatgacgagaggaagcttacctacattatgcctaggacaagaagtttttaattcccctctaacaatgcagtgtttgcaggttttcatccattatcactttgttagagtatctttgctaaaacccaactattttataggctcctctgacacctcacaagaatccaagggaggaaatgaagccaatgaatgtaatctacaggtgaaatttgcagagcaaattcaggaaaaaaaagtaattatgcttcttcgcattttatcattttataacctcaccttttagagaaggtattgagagattatactgattagtccagatttttattttacatatttgttcatggaaaggcttattttaacagaagttatatcaaggtgtcatgcccagtaccatcatcatcatcatcaaaaatttgactgaataaacctaagtacacacacacttctgtatgtatagtcttacatatgaaagtaatatttattcattcaccaaaaagtgtaaagagaggttaaaacaggatgggatgaaacagtgtacaaaggtaaggaaaagcttttccaagcaactgaatttcccttgaagcctgaatgttaagtggaattaggcaaagtgtggtggttgtgggaaaattcaggcagaggatatagctagtgcaaaggctctaaggctgcaaaggatgcaagctatgcaggcatggtgcaaggaggcctttgtgcaggaagcaaagggagataaggctggggtgacccacagcctccttcttcaagggcactggatagactcctgggaagcaaaaagtgactggattaaatttgcatttcaaaaagactcttctgactacagtatgtggcaagataattgggtgaagcaatagtccaggtggaaagctttattacagtcaaaacaaaaaaggatgaagacttggattggggtggtacttagtgaagaggcataaaagaagactgaagtcaaaatgacaggacttggggatgggtgggccacagaaagaaggtgtcaaaatgattgtcacagtaggtaattagtcattgattgatagaaaatggtaatcactgaactaggctttttatcttcattctgttctatttaggttcattctatccaaagtatttagtgcttaccagatgcaaagtacagttaggaattctaatggatagaaatataaaataaatggatacaaggttatataatctctgccttttataggcttatattcaaatacagacaatgctttccatttccagtaaagggaatgagaaattatatacccagatacatatatattgacacacaaataaacagatgtatacacatgtatgtctacatatgtatatatgtatgtacacatatgcatatataagtatatatatatttgcatcatatacacatctaaattaagggtgcattgccaggggactgaggaggataaataatgcagaggtcagaaaaaataactgaaaagttgtgtgggatggtattcttcttataagaaattcaaatgttttcaaaaatgattgtcttatatatctgccttattacagaagaaatgtatgacgttggccctgtttatcagggccagaagaagaaattcagcaatagtatttagcagtattaacaattttaatccatgatatcagtcatgacactacaatcctgacagtaatcttattaatagtaatgataaataatagtaatcattagtatgtagtaatttttaaaagtcacacaagcagaaaaacataaacatagatttgattttaatgttgtttgaacattgccttttagcatttttctttgaattctaagctcataattttatcataaaactgtctttacagcagacaatgactaattagtaattctattaaatatttgccaaatggagggtaccacttctagttttgccagagtgtcttgctggtcagaagtgctttgcctaataaactcaacatgcatgttgatgctaagagtctaactgaacacacaggacaatcgcaaatctgtgaattattaagcctcctttcacctcaatttcctccctcataggatggtctttgcttatctcagttttgtgtgtattccttttgattgcttgttaatgtctcctatttatagtgatattatgtaacagtattatttaatctccaaaatagtatacaattgtcaagtaccattgctgtaattatggtgcagatgttggaatatgcttggaatcactaaaagtgaatttaccataagctaaggaagcttactcttcagggactctgacttgcaagagcctatttaatttcttattacctaaatttgtaagtttaattttgcagtatttttcttttaaaagatcccccaaattttatgagcttcatttccagaaaactcatctggccttgtttttcatattgtattgtcatatttaatttgtttttatgcctttctcacaatattttaggttcatgagatcagagacagtattttatttgtttctctactgcctagcttattatttatttatttatttatttatttatttatttatttatttattgttatgagacagggtctcactgtcacccaggctggagtgcagtggcacatttatggcttactgcagcctcaacctcccagggctcaggtgatcctcccacctcaacctcccagtagctgggactacaggggagcaccactacacctggctaatttttgtatctttttttttttttttttttttttttgtagagacaggatttcctcatgttgcccaggctggtcttgaactcctgggctcaagcaatccactcatctcagcctctgaaagtgtaagaattacaggcatgagccaccatgcccggcctgtctatcacttagttcagtaaatgcttggtgaatgaatgaatcatatacatttagtggttgttttgaagttgactctgctgagtgagattttctttgcattcatgcatcttcattaatgtcaactttgttgcagtttttaaaaaagtaatctttgtttacattatcttaagttacttgatttaaaaaagttaaaagtgactatttgcagaattctaaagtcccattactgtcaacatgcataatattttgccaaaaatgcaatttgtcttgttagtcttctttaatttttccatgttttaaaacttttcttggagtatttcccaaatgggatttactgagaggatatattcagccagctttgtagattctaagagtccttctaaaagttaagtctagccaaggaaaaatgtagtggcacacgattgcgtttctcttacgctgtcatttaatgtgagatctaaattttgcatttctttaatgcccaaggtgtttattttttaaaatctgtactctttttatcaggagttatgttgacaatttacctgggagctgatataccctatataatacatgatctaagacctgaacaatacacaaattaataaaattaaaccattaagatatgtcatcatttctaaattatacaattgggttttttttttaaagcaaaaatattcttcctcttttctccatcccttgttctggtcagttccaaggttttttacaaatgcaaaagaaattcatttgctactcctgaccacagagatgaataatttaaggacaatatcaaattcttgataaatctcataaatgttttaactgtccaagaaatggacatttatttggttaatcttttagctggccataaataatgtaataaaaccccttaaaattaacattaaataacataaagacctaacgatttttagaaaaaaacctttttggactgagccttgaatttcctgagaattcagctacaagtgataactaaaatgtaactcgagaatctggatatggttccagaaaggattgttgtcatgcaattgccatttcatcatctttccttaaagtcccttcaatatttatcattgcaatttttgtcctgtcttttcccctccatcacatcaaaccaaggaaaaacaattattaaatgctcatttatactcacctccctcccttcatattcattcattcctcagccctaaaattcctgtaggaatcctgcttttacgttttatcttaaagccaccatagtatctgtaatctcttttgtagtcatgtatgcttaattttggaagactgtcaactacctcttcaggttcattcaaatgaaaatgtatcacaaaatcgtaggctcttcccctatctcactgaaaaattactctaaaaatgaccagtaagctgttttgttgaagcaaaacatccagaccctaaacaaaagtagcagaattacaacatttccatagaaatggattttgagcttcttttttttaattggggaaaatcttattttttaaaaaagaatcccagaatacatctttgctttcagtccttcaattctaacataatgccatgttagagaatatgtggtagtgtatactaagcccttatgctgtctcacatccttgggacaaaatatctgttttgaaaggacttctctgaattttgctatttcctgcttactgagcagtggccccctcctgggaaaacagagttatttcagccagtgttcagactccatcttgcatacgtctctgtggaatattaatagtgctactgagatatattcatcatcttttctctgcttttgctgtctttatagcccagtgaaatttatatttggtgtttgtaggaaggctatcagaagctacttggacatcaaacttttaaactataaataatgatggcaagactgctaggatatctttccacagttaaacccattcaacagagtttcgttcttatgacagtgcaaattaaactagaataaaattagtgtgattttaggacagttttaaagtgaacatatttccctccctcccttcccatctacatatcaaggagacactccagactgcacttttatttaaattgcggccatcagaaaataccgtgagaaggtagtgtgtaggtaatggttcagttagcattgaccccagaaaatggaaaaccaagagcaagtcacttttaaagtgaagcaatagattttgaatatggattgttccaactcaccacttcccgaccacaacacaagagtatttcactgtaaattaagagtctaagttaaccacagctgtggtataactctgagaatgttttctctacatgtagacaattctggatccttccgtggtgcccgttaccctggtctttaacttttgtcctttgcaggggaggggtcaatgccttcttatttccttgctctttagaattctccaccagagggaggacaagggaaggagtaggtttcacgcgcagttctgagtaaagtttgaatctgagaaaccccacattcacgaattaaggatctccagttctgtgtctttattctacccctccctgcctgcttttccactcggcagaactgagtgactttcagcggctgcagtaattttaattattctgagtcgtgctccgaactatgttttttatcagttcctctgaaaattaagttgtagtaagagacgtagtttaagggcacccccttagaagaggccaggttattttttaaggaaaagctgaagatttctaacaggcacttactaaacacacacacacacacacacacacacacacacacacgcacacggcgcagacccagcaggagagcgcaacctagcatctttaaggttcgcttagcccttcctgtgcacctggaaggaagccttatcttaaactcccttccacctagagtttattttcgcctgcgtgcgacagggcttttgtacttaagtgagttaaggaatgaaccccgaactcttctgggaaagccaccaacgttccccccgcacccctcccagggttcctgaccacggagactctgcttggggcacaggtgtgggagtcgcaaacttttctctgcgccgtccttttccgcgtggaatgggacggagcagccctcccaggcgctgcctggctgcggaggggagcgggcagcgagagcctcgggtctccgcctgggttcccgggtctccggggcgctggcctcggtctccgcgcagcgtccagcgacccctgtcgggggttcccggcagccgcgccgccaccccccgcccggccagcgcgggaggaaaaggggctgcgcccgggagcgccgagcccaggctcctcccggtggcgtgtccgcgcctcggggtgggggtgtggtggggaagagggagggggcgaggccaggggagggtgcgaaggaggcgcctgcctccaacctgcgggcgggaggtgggtggctgcggggcaattgaaaaagagccggcgaggagttccccgaaacttgttggaactccgggctcgcgcggaggccaggagctgagcggcggcggctgccggacgatgggagcgtgagcaggacggtgataacctctccccgatcgggttgcgagggcgccgggcagaggccaggacgcgagccgccagcggtgggacccatcgacgacttcccggggcgacaggagcagccccgagagccagggcgagcgcccgttccaggtggccggaccgcccgccgcgtccgcgccgcgctccctgcaggcaacgggagacgcccccgcgcagcgcgagcgcctcagcgcggccgctcgctctccccctcgagggacaaacttttcccaaacccgatccgagcccttggaccaaactcgcctgcgccgagagccgtccgcgtagagcgctccgtctccggcgagatgtccgagcgcaaagaaggcagaggcaaagggaagggcaagaagaaggagcgaggctccggcaagaagccggagtccgcggcgggcagccagagcccaggtgggtgcgcagcgcggcccgggccccacgatcctcctcctgctcctcctactcctcctcctcctcggatgccgtggcctctccctccccctctccctcgcccgtcctcttcgccctgcgctctgagcgcccgttgagtcgcgcggtgcttcccctcctgggggccgccgctcacctgggcgccgagtcctaccgggcgcctacgcccagagctcagggcaagggacagcagtcccggccgcaccctcccagagtcccgggagcgcttcgctccctggcacggcccctccccagcgccttagcggctgagcccagcccgggagtgggacctgggctataggagtcgaggctgcgtgcgcgcgtgccccgcgccataagcgctttgcacgggggccgtgtgccctctagcgggaaacgctggaatgggccgcctggagggagagccggtcccctcggtgtgcctggcagcgcagaagtgggtggtcgagcaagaggccgcgtgggaagttagcttcggcgttttggggcacagggcaagcgatgtagagtgcgcgccggttcatcttgattcagtcctgtgctacggagactcaagagcagcggcagggattcctaaaggtcagcgaagcagatgaaatctagtccagtgtcaggaatcagctctgccccaaacaagttctacaaacttttggcttaacagttctatttttcaagacctctgtgataaatatggataatttactttcccaagagatgtaagaaaacaaccgtttatctgaatttttgaacccaattgtttgctggttatctatataataaaatggcaattgaagctttctagaaacaaatcttgtatttcatcatcagaacacgagcatgaacaaaagctttaccttagatgtccctaggaagcgctgatgctttggacattaccttggacaaaagaggcatgtcgaataaatacttgtttatgagtgattggtaggtagctgataaaagaggggaggaaggagatgggggagaatttattttttgcctctgcaattcccaattattaattgatccagatgccttaagtcgcttcgagcgtacccccaacacacatttcatgaagcacttctgcagaattaattcactagtacttgataatactgtggctacagtaatactgtagaagtatttgtcccttgctggaagaaaacaaaccacatttgcttggtcttcttactggtatcactgatagcatttcagaacctgggttattggcagagaccttcagcagagttttgagcaaaacagaaattgaacagagagtaattgtttcaccactggccattcttgtgcttgcttctttaataagatcctgctgatcatattcacttcaattactgatcattgcccctcatgagggtgtattgaattttcccttatttttaccctatattttggggagagaccatagcactttattcaacaagataggaaattggggagctggattagttacctccctgcgtgactttgtctactgtcctttctaaggtcatcatagtacattacggagatttcagacctagctcaaatcgttgtaaagagttattttgggggctcttatcactgtttgtggttgtgttctcctgtctccctgctcattggcttcagaagaagtttctgtggtcctctgtagatggtctaatgaattaagaaggggccagcggtctgaagtagcatcctgttcaggtaataggtgtgcattttgtcaagggctcccagcagcagtaccgtaacacagcaacttgacaagttcagtgggggaggggcaggcatttctgtgccctccagatctcatctactaggtaggcagctgtcttgtgattagctacgctctcttgacacagagcaccagagcttccttggtggctctcatctgctttccagtggtacagcagtgattccctgtaaaccagctaagtcagtatctttaagtgacatttgcttaactgtcttccctgaaaaattggggtgaatttggctgtaggttagtttttagtatatttgtctctgttttccaccagattataatcttttttggggagggactttttacccccttcgaagcatcttgtgctttttaaaccagataagaatatgtattctttatttgattcagaaagaatggtcaacaacttgaaaccagctttatatagaagcacatggcattaaatacaatgcttcagaatcagtgtttctttccttctttgtcattttccttataatggtaagtgccagtgtagttttccttgtcttaggagaattcatacctgatgactataatggtttgtgagaaaaacccacactctaggtttcaggcattcccaaaggaacgacctatagatgccataactctagtattcacacttgccgtgccagcccaaattaggacttaggaggacaagtttctcttgtattgctcccatcttagtgcctgtcagttccaagtttcactcctttcttaaaacagccactgcaactgtctgtccttgatgatatgtatgcaatagccaagcctctcttcagctgttttaacattgcctcatgacagtcaggggagagataatggggtgggatctcagccactcagccccgctgtgtgctatattgtacgcataggcataaacacatctgttggagggaaattttcagggggaaaaggcttctttaactttcatatggcatgagtgactgatatgcgatacatacatggctatttcagagcatctgcacttttatacaattaactaaatgttgaattgcacactattggggctgcagatgttcaacacaattatctattccataataatagctctaataggtcccaagcccttggagtcattgattccttttctttgctcaaaataagcaagctaagaatagtcttgggtgctgtatcactgatccacgtaccaagagccctgtaacagcctgggtctccttggtgctggacctcccatatccagcctcttcatactgattcagctcaacagactttttctcttgaagcctgaattacaaaaccagagcttttttttttttttttttttgacggagtctcgctctgtcgccaggctggagtgcagtgggtgcaatctcggctcactgcaacctctgcctcctgggttcaagtgattcccctgcctcagacttttgagtagctgggactacaggtgtgcgccaccatgcccagctaatttttgtatttttagtagagacagggtttcaccatgttggccaggatggtgtcgatctcttgacctcgcaatccacatgcctcggcctcccaaagtgctgggattacgggcatgagccacggcgcttggccgctttttttttttttttttttaatttttggccaattggtatttgactctaagcttcctttgtgattctctgtcgatatgttgttcttactctgcacctctgcacggaattctgtcttttttctttttcctcttaaataacctgggaaaaattcactatcatgcctagccagattctagaactatcctgtctcccttcactcctggtaggaggggcatttgtgagtctgggtgatggaaacattgagaaacctagtatcccaaataggtagaagcaggctgtgtgtttccccaatgacatcacccacctgtttccctcactaagtggctctgcaggctgaagtgcttgtaaacattcttgcgtataaagtaccctgaccctaacggggcagcctgtgtttacagaacaagaggaatgtccagtgatctgtttcaacctggttacttgtaaccacctagcctatgtaattattaaaaacattaaagattattcacagaatgaaataggacttattttgcagaattaaaatagcaggaagagcggaagaaagttgtatattcagacatgaatacttctcatacccatgaaatggtcagataacactaatgaaaaagaggagaaaaaatatatatagagaaccaaaaaatattagacaaacatgaacactgaatacctactacatgccaggcactgtgctggacacttttatgtttattaatgagggacctgctatttattgaattcttaccatgttccaggcagtaaaacagatgtatattgtgtattttgtcatccgtcctttcgaaaataagaaaattccttgctattaggcagcaagatgccagatggcctagtccttagctcttcagccagattgcctgggtttaaatcctaattaggctgttccttaaatatgtagtcatgggaaagttacttaatctttctgtgcctaaatttcctttttctgcaatatggggataataatactattattattatcatgagggtttcatgaagcttaaaggaaataatccatgaaaagcactctgaacatcaaccaacatgtaataagtgcccagtaatattagctgtctttataaaactacttaagaaatgaattatctgtgtctttgcaaagatatttgatataatttccaaaatttaccttttatggtaaaaaatatccaaagctgacctcagattacagtggttataaatattaatatgtactacctgtaaaactagagaaaagtggataagagtgtcaaattccataactgcatatatacattatgaaaacagtactgaactcaatctaaatattgaaagtagagtgaggtgcaacataattttatctctggcagaaaaatgttgaggtttcaagctatgagaagattttgaaacatgactcttttttctggcaacacttaagagttgatgcttaaacctcactttattgtatagaatacataatcttctcttttgggactcgtataaattgcagcaattgaaaaacaaaagtgtgcaccaacctgcccctcactatctttttatcaagcataacagtatattgccagcaatgttcatagaattgagtgcaggtgtttctaaatataaacaaaataaggaatatattaaattcacatttctagttttttatttcctcctcagccttcctagaatggctataggtagtgtttaaagttctggaagtgtgatagattcttaccaaatcaatgttctgttagcattctccaagtaacaagttaaattggatttgaacagtactgatagtttatcatgttctgttaggatagatgaaaacaaaccaaatgccagtattttgggtgagtcactttatttgctcaaagacgcaaatgaatgaacttctggtagtttagttaaccctggagctccccctcttgacaaatagaaaaaacaaaaaaataaatcagatagtattagcttgaaaacggatttcttttacccagataaaaaatatgccactaaggtacatacaatgaagttttcttgaaggaactaatgatattttggatttctcctaattttgtgcatgtctgcacttgtgtgtgtccttgtgtatgttttaatgggttaaaaaaaaaagcgagctaccaaaataccaatagatgtcagtgtttgtcgctttagaaaaagtgaggtgttagaaaaaaagaagaaatggacagctttatttatttttggttttactaaacataaagctggctacttttcaacaattgactaataattcactgtatataaccctgtttacaaaagtacattttattaaggaaaatattccatgttctcatctttcttctaaatttttttaaaaaagcctctgcagtaaattcccaaaagaattcagaatgtaggcagaaaatatgttaattttttaaaattaggaaacaaaattatttgagaatgtcgttaacacattagatttcttttgcatttttaaactagaaattagatatgcactttcttatgttgccctgattatgactgataaagtgcatttttcagtccaagtcaagtgagatctgtggagttctgcctctacataagagcagagatgatcagaattctcttcattcttcctatgccccatgtcacctttttctggcctccagagggtgctccaggagcatcacactgctattccccaaagactgcttttttcttctctctctctctctttttttttttaagttactgcagtattctgggcaatctactggaagaacagagtcccgattccatacatgttagctgcctcaactggagtttgttttccagctggaccacatagccctaattcattaagtattctaaattagaatattttaaaacattattctgatgatgttgatgcagtggttagcttgcaaggggacatctgtcagattaattccctctaggaatttcccccaagagaatcaagcatctttaaataccttccaatcacgccttacaacagctccctcccactgaagtgcacatggtacccacaaagagatttagtgctatttaagagtttcactctggcattggaaaactataggtgaaagcatcaaagttggacaacagatctttactaacacatttgttttcatctcttcctatctctctgtttcctcaacccaggggcaacaaatgtttaggagccccactttgattgagtgcacatttttgaacacaggtttgagtgactaattcttgtggatcatgggctgattttatttatgtactttttttgagacggagtctcactgtgtcacccaggctggagtgcagtggtgccatctcgactcactgcaagctccgcctcccgggttcacgccattctcctgcctcagcctcccgagtagctgggactacaggcgcccaccaccacgcccggctgattttttgtatttctagtagagacggggtttcaccgtgttagccaggatggtctccatctcctgacctcgtgatccgcccgccttggcctcccaaagtgctgggattacaggcgtgagccaccgcgcccggcggggctgatattttaatatggtcacacaggccttgttatttatggtttacctgcttatgttaattccaccctgtacttgttatctttgacatgagttactctcaggatattactccccttccctttttaaagtgtaatattgttcccattgtttcttgctccaagaaatctgtcgttgatgggaatagtctttgactgccacagtgccccgaacctttcattccacagctttgatgggcagggagctgccttctctgggcagctgtggagttttactttcaatgatatgagagtcacagaatgttttattagattgaatcatatgaaattgtcagttttgtaggtcatacctggctgaatattgtccatgtcatacagtttaatatttggactttgaaaaagtaatttgactttacttattctttacatattctttaagtaataatgacaactttgaaaaagaattatgtacgtttttgataattaaataggattgaagtaatacataaaagaaatctgagctagggataattgaagcagtaacattttttacaaccaataaatcagctaaaatcatatccatattaaatgaatttagcataaaattagaatgacagagcaactagcattttcccttggtgagaaaagtagtaagtttccaccataaaatatgactcatttttatttgacctattagcagatagttgttattgcaccttatcttaaccaccattatttctacagagagattacagagcaatgagtaggaaatatggaagattgctgaataatcctggctttagttatggagtaatatgaaaaaaggaaaagaaaaccttttgttcactttcacagtactacatcaatgcaagctttttagtagttttaatgtatgaattttatcatcaggtgaaaatgcatctcattattagatggcctattttataaataaagttcaaatttcgatatagccagtttttaaaactgtatatgtttataactcatccctttgttgcatataatctcccaattttagagacttacattgcatttttaaaggatagcacagtctctttagcaatcccacagggaatctaaaaccagcctttacaaggagatgtcaaaattccaatttgcagtgatatttttgtcaaaacaagtaacgtgtgttattacgtatagtaagttaacacaatttttcatttgtgtatcaagtaggcattggtttttgttttttggtttttggttttttttgagactaagtcttgctctgtcacccaggctggagtgcagtggtgcgatctcagctcactgcaagctccccccactgggttcatgccattctcctgcctcagcctcccaagtagctgagactacaggcgcctgccaccacacccagctaatttttttcgtatttttagtagagacggtgtttcactgtgttagccaggatggtctcgatctcctgaccttgtgattaacccacctcggcctcccaaagtgctgggattacaggcatgagccactgcgcccagcaagtaggcattgtttttgtgtgtacgtatcaaatctgtttttatatcttttggtattttatctcttttctgccaacagggtgaaatggaagtacagtattgggattatgcacaacattttattgtttaaaattatagtattccttttccattctgttgtttcagttgtttaaaaataagtaacaaaagagaggggtctgtcttgaagcccatgagatggtagatctttagaaacagttataatagcagtcatattgaaactgattgtcatctatttctgggaaaaatattgaaggctggtatattgtccccagaaggattagatgaaatacagaaaatagattatgattataattttttttagtgaggtcaccttgctgtagagttggaaccttcccgggggattgctcatgcattatccattttgggaaagagtaatacttacaggcattatggaaatgagcgggtaggtttgtcaagaggaaaccaataatttgaatactgagttgaatggaaaatgaaatacatgattttccatatattaaattgaatagaaatgggagacttatgtcttgagggtttttcttttctttttttgaaacatgttgatgatattgtgtgttcccaagtgccctcaacctgacaggaaggagaaatgtcaatagaaatagttacttattatattttgatatttagaaaggaacagtggagttttaaatgttgtgcatatcatttatgccccatccaaaaggatagcgatccacttaaaagaaggcagaaaagacaaggaccgctatcgttctccaggaatcaacagaagctaagggagagcgtagagtatagtccctgtggcctctacggagtcatcgccttctcagactgaatccacacaaggccgccttgactgaaagagcctctacattggactgtgcatggcgtggggaaatgtgattacttgcaatatgctactgattacagaataaatattatgcattcggttttcactaaacttaaaaagcccagtgaaaaccccacttctgcatgtggtgaatgtggttatgctgtgtcaggtgaagacatgtttcagtgccttcgtttactttccattaagatatgctgatttccttctcccttatgaaatagaaaaggaaggacataaccatcctgctgctctgccctgagtgcaccagtataggaataaaactctgtaaacagagggtggtggcaaccatctaacagggacctgcatttggacctgtgtgtttgggagagccgcaaagtggctgtgcctctgatatcacaggactctatgaaagaggcaaccaaagaagacctgaggctcttcttgtcattttagatatgtgatttcataaagttactcttgaccttaatgcagatggccatttgggatttgtgtctgtgcatttcatccacagctggatggcatagttgctgagtaatcctgttgctctggagcaatgtaagttacagctgtggccaggcacgtggctcatgcctgtaatcccaacactttgggaagccaaagtgggagatctcttgaactcagggattcaagaccagcctgggcaacacaggagtcctcatctctactaaaaatccaaaaagttagccgggcaaggtggcatgtgcctgtggtccagctgttaaggagggtgagatgggaggatcacttgagcccaggaggttgaggctgtggtgggcaattatgatacaccactgcactccagtctaggtgacagtgtaagacttgtctcagcgaaaaaaaaaaaaaaaaaaaaagttaacaaccatatcaaaagaacaatttattcaccccccaaattgtcttggaattctcacattaatttacagagagaaataaccctttggaaaattcacaatgttttgctagtattagtatgtcatctcactctaaaatgtaaaaaaaaaaaaaaaaaatcactactcagaccttataagaatctggtttttgattatgaatacagcaattcttttttgaaaactcccttgacaaattaagccaatggtggacattctaataattgtcatattttatggtacatttgtaactaaaagcctcttctttgggtaatgactgatagtttcatggaagaagtcattctttttctggtcactctagaaaataagaaatgggaaatgattgtatgtgatatacatatgcatggttctaagtaccaaatttgcagattgcctgaaaatgttcttatgtactttttatggatacaggctttcttttcaattagattcaaaaagtatcaatacattattatactttaaattgactagagctaccttttaaatggtcagataggttttctttttaaagaattacttttgtgattactagccacctgaaatggtgtttcaaggccatgcatggtgcctcatacttgtattcccagcactttgaggggctgaggtgggagcatcgcttgagctcgagttcaagaccagcctgggcaacatggcaaaaatctgtctctacaaaaaaatacaaaaaaaaaaaagaaagaaaaagaaaaaccattagccaggcatggtgggatgcacctgtagtcccatctacttgggaggctgaggcagaaggatcacttgagctctcagaggttgcagtgagctggaatcgtgacaccacactccaggctgggtgacagagtgagaccctgtgtcaaaataaaataaaataagatataaatgaaatagtattttcaagacttggtataaatgcatagctgttaagctgtaaggacatcaataaatgttcataaataggtaactttctacattctatcaccttattttctataatacagaaaatatactttaaattattttatttatctgagtccttttattctttttgcttttttttttgtttgcaagaccaaagtcagagcaatttcaattctattttgagcattttattttggcactcatgtattttaattaaaaaaaataaataaaccattgtcctcagccagaagaattttctgctgagtggtcataaatgcagagtttagcatttcacatctctagaatgtaaaagccacaaagtcatatctgtcttttatgttgtcatatcaccaggtgccatcatggtgctgagaacatagtctttgtttttaagaatttattcagtaactgactgaatgaggaagtatggctagtttgcttaagacattgagttgtaggagttgatgggtagcagtttagttattatgctactgtcagttaataagaaagtatgagtgcaattcagcagtatcagtgatgcatggatttgttcctaaattgttatttttgtggttgaaatttgcactgtttattttgaagctctctgtgtaagtcataatcagtgcttaattattcagactaatgaattggaattagaggtttgctcagtccacaattcttgctaccattaaaatattttgttacatttgtttttgagtacatagaagcaactaagaaatggattaagatgctgcagttaatctttgtaaattactatggccattgcctggcacctaatgtttgctatgttaagagtttgttatatgaataaacgaccgctgttcctggtaggtaatgaaagtaatcttaaacaatattagtactgcctaaaaagtaaggtcttaaatataactacagtagtcctgagaaaaatcatagagtgttagaactgaaaaggttgtcttagaggtcatctgctcgaatctcatctttttagttgaggaaaaccacaaggtacaaacaacaagggcatcaatcctagcactagaacccagatctccagatttcagggtaaggattttaattattaccatgctatactttcagtctcaagatggcactatatatgaattcagcttcacttttatagtgctttgggtgttattatgcttccagataagagagatgtatttctgtgccattgaggaatagcttagagtacctatgattcataggaatttgaaggctgtaaatcaaccgaatctttatatctttttgttccttcttgcagtatcttgtacccaagtagcttcaataaattttgactgacaagatgaccataaaataagtagtcctaatgtcataacatggaaaaggagggtaatgggtgtgtgtgtgaatgtgaattagtatagtatagtaatgagctgcctcagcgctcttaaactttttttagcaccaatgcctttatgcaggaaactctgaaaacaagcaagagatctttgtgggctctctgtaaattatgtgcatgcaaaaaagcatcctcagtgcttgtcccttgacagctgctctgagaccactgagtcactcgcttgcatctgtgagccactgaccagtcactgattgcagtgacagtttatcactaacaacctgaattatctttgacccagagacccaggggtcaaaggcctcctagtccattattaaatttccagggcagtagttcagtttgcattaggggatttgtttatatttatttatttagggtttttggggggtggggggtggaggagcttgggggaatgagacctgcagttattttccccacattataagattatttagtcctttatttgtgggatttggcatcctaaaagaaaggaagactcaaagtattgtggttctggtctgggcctcacatgggtgtcctaaagatttctgggacccatttatgggaagaatgccactctacagattatagcagggaggagctttgccctcaggaagacacagatcctttgagggtggtagagactcctaaagtctgctgattcatacccagctggccccattaacaagagaattaaagagtggctagaaagggactgaagagttcactgggggcccatccaaaaagctgggggtacagacaactgctgattcccagccagtcatggattttattttgagacaggtctcgtttggtcgcccaggctggagtgcaatagtgtgatcatagctcactgtagcctgggactcctgggctctagtgatcctcccaccttaacctcccaagtagctgggactacaggcatataccaccatgctcggttattttttttttaattttgtagagatggggtcttgctatgctgcccaagctggtctagaacttctgggctcaaggagtccttccaccttggcctcccaaagtgctgggattataggcatgaaccactgtgcctggcttgccagtgatggattcaaagtcgcctctgggttgtaaccaggaagcatgcctgggccagactgagagggctgaaggatgacggcatggtttcagtgtgtgagtgtgcatgtatgtacgtgtgtgtgagaatgtgggtaagtgtgtgagcctgtaaaagtgtatcatgagtagctgtctcttgggaggagagggaatcaggaaccttggtcaaataacaccatgtactggcatggaaaggcactgttctgggcagcagtcaagaagacagaggaggactaactgtatatgatttgggcaatcatttaaagtatctgggatttatttccttgtctaataattagcaaggttgatgtagatgaggtataacaactttaggggtagaagaaagctatgattcaaagtcggcattttattagatcagtggtctctgatttggtgtgatgtgttcctggtatgttttcgcttagaacaaggttgtttaacccatggcccatgggcttcatgcatcctaggacagctttgaatgtggcccaacacaaatttgtaaactttcttaaaacattatgagcttttttgtgattattttttccagttcatcagctgtcattagtgttagtgtattttatatgtggcccaagataattcttcttccaatgtggcccagggaagccaaaatattggctcacttagagtctttagtagtgactatgtttttagaaagcctaaggtatttgaagaataatagtcacataaagtctaggcaaatagcaaatttgttttatgtaggaaacagcttatcttctatagaataacttttgatgggtgaaattgtagtgttaatttatcttagtgaacacctagaagatttgtttaggtatgtgaattgtttagtgaaaatgtagaagatggtaagtatatttgggaattactagtgcagaagccttttattaaattctcaatagaaactgggtactggttatgaattgtgatctctcagatacctttaacttagtcgtctctcatgagtatgtgatacaattgaagttgtgggatttaacctctgctgagcagcagaaagatatgaagcagtggaaaatacaggctaaacagagcctttcagaataatttttcctcagtggtttatgttcttcacattcagtttttattcttctccatccttaactttctatagctgatacttccattttggatataggctctgtttcatttccagaggtatctctttccctaaactcatcaagtactttttcaaccttgttgatcatcttaacagaagaatcgtaacattaagttgatttatgacaccatatctctgtagtaactctgaattgtcatcaagctattcattgaaaggatacctcttaaactttctattactaagatccccaaatgtatctattctcctctcgataaaatgagtattgtcttagacaagcagcagactgctttttaagtgaagtggattaagctgctgtgatcgtccctgtgaatgtgtatgataaatcattttgatggcctttttaaatcagagtcaccgagtcccacacagagaaacagagaatgctgtctgtcattattacaataataattaagcgttggctgataggatataaagtataaatcaaagatcttagaggaaatagatgaaagaaaagctttgtttctcaaaaacttaatctaaaagaagaaatattgagcaagcattgggtgcttcatgaatggcctaaaaatatatttaagtctatcacctggaggttcgttcatttattgccaggaaagaatcaatcccacttttttttctctttccctgtggctcaactccaggaaggtgttttaattgattggtgggaagattttaacacagacaaaacttataagctaagcatcattatttctagtacagtggcttcaccacattatagggtaataaagttaaaagctgccgattgtttcagaattattttcagaaatttacatcctctttattcctattaccttgagaaagagttcagagaatgggcttagtcagcatgcaattatggtattagataaagcatacagtttggtctaaaaccaagatgcagctagtctcatcagggtactttaatcaatcaagggttgttaagaaggtaggaatgtcagtctaacttcattcctttgaaggtgatcagcctttcttctctggaggctttgaagattttgtcctatggctgggcgtggtggctcacgcttataatcccagcactttgggaggctgaggcaggaggattacttgagctcaggagtttgaaaccagcctgggcaacatagaaaaacaccatcttcctctccccactaccaaaaaaaaaagttagccagttataatggtgcacatgtgtagtaccagctacttgggaggctgaggtgggaggattgctggagcccaggagtttgagggtacagtgaaccatgatcatatcactgcactgcagccagggtgacagagaaagacccagtctcaaaaaaaaattgttctccaacaaatcttttttgaagttatggcatttaaccctgcccaccattcccattcccctgtcagtttcactatcatgcattcctttttctttatcccactcaggaccattgggcttgtcaaacatataaattggctttcaggaaaattcttctccatatctcttaaaaatttcctgtatcccattctcttccctctttttggaattttctttttctataatttaaagatagagtcttgctgttttctaggctgctctcaaactcctgacctcaagcgatccttctactttggcctcccagtgttgggattataggtgtgaaccattatgcccggtctagaactttaactaaaagtacgttggaccttctttctctgaacactggttctttttacttccctcacgtttcccatcattttgtttcactctcccgctgtatctcttttgaagttatcttccccttcactcattgactcttcagctatgtgcggtctgctgccaaaaccatccatgaagtttttcatttcaaggactgttttcccccctaaacctagcagttttatttggtgccttttcaaaccttctatgttgtattttatattttcaaggtccctgtagatatttttcaggttgttatttatttcttttagcagagtaagcctagttgtttcataatttctgtgtggtaatttcagtttgtgttggttctcactctctatgccttggttccttctgtgcttgatggttggtctctgaccctgtgttggccattgctctgtaaaaattatctgtgtcattcctcaaggcatgggatagaagcacattcctgccgagaaggtaagtgttactgctgggtacttggaaacttaccgagttcgtggcttgaggttctgtggcctaccagcctgtgcacacctaggcatgtagaaacctgtcggtagactcagcttttccctctggctgaactcaggatcaagacaatgtgtctggccggacacggtggctcatgcctgtaatcccagcactttgggaggccaaggagacgggtggatcacctgaggtcaggagttcgtgaccagcctgaccaacatggcgaaaccccatctctactaaaaatacaaaaattagccgggcctggtggtgggtgccaataatcccagctacttgggaggctgaggcaagagaattgcttgaacctgggagggggaggttgcagtgagccgagatcacaccacttcactccagccacagaacatctcaaaaaaaaaaaaaaaaagacagcatgtctttagttctctggggctaaatgggtatgtttagatttggtgtagcttttttggggttctttactccttttggggtcccagcttaatgtgaagagggtctactctaagactccccacttcaggaagatcctggagcctctatccctttctccaggatgagcaaatgcacttgaagaaaaagtagttgctttgtccaggtattttgcgtctatctctaaggtttgagatttgccttagaatttgtccaaaaaatgatcttttttgtcaaattcttttaaggtgatgtttattatatttcattcagcacttttaattgtttccagccaggaggttcttgtgagaaacttaccttccaggaatggaagaggaatcattagtcattaaggagctaaaaatgttaggaaaatattaatgcttcagaaacaatttgttgatctgaagagtacctaagttagggattttcagaaagtagcattttgttttgttttgttttgttttgtttgagacatggtcttgctctgtggcccaggctgaaatgcagtggcgcgatctcagctcactacaacctccacaaacgattctgttgcctcagcctcctgagtagctgggattataagcaggcaccaccacacccggctaatttttgtatttttcgtagagacggggtttcaccatattggccaggctggtcttgaactcctggcctcaagtgcccacctcggcctcccaaagtgctgggattacaggcatgagccactgcacctggccagtagcattctttggatgaattgactctggttttgttagccttcagaatctaaggaagtttatatctggtcaattttgagaaagaagatctctaagaaatgcctcaagtggggaagggatggactttataaaccaaaatgtcaatgtgttaatcctaaatatctcaatgaaatggggcaaaatatggctaagaaaaatttgacaaggtgtaaatctcactgaatgcagttgctgtggttgctaccaagtttacaagagaagaaaccaggttttgccaatgcatcaaaaattagattaaaaaagaaatttctctggcctagtctgatgcttagccttcaagagtaaaatgatgtgttgttagatgacttgaccaaagtcccatagccaaggcagggagagtgttgcagcctggtggtccattatctgatgccactggatctatgtagatgagtttggaacttcactttctgccttgtctgggacgtaaaaactttgggtgcccctcacttcttttttatataaactgttgtgttttattgccctggcactcttaagttgctgtttcaccctagcagtgcctgcttcaagccatcaccaatgaaagtgcctttgaagtgtcttaaggcgtgtgcattgcctagacaaatagttggcagaagaggtcaacacaagcgtctttgctttggagtgtcaattgaagaaattgtttttccacttgaattggcagtgtgtgctcttactgctgttagagttctgggcagagaagtagatgtgataattatgaagggagaagggggaagaacagctgcagaatgcagggaagtgactggactccagtaatcatatttggcaggtcaagggtgagatttagcctgatgggatttggaccattccctgggctagaaagtagtgttaaaatcaactccaggtgtttccgttattcttaaggcctaagtattattaaagcagaaaataatatggttaggatatgaatgggaggggattggtcattcgctgcttgggaatcacttatttgcaatagagctcattctctcttgacagttgctcctacatgtctaaaatacaccataaatctcgaagtgctcgtttcaatattgaagtttcctccaagtgagctgttatcacttttgtcttcaagagaatgctaactcactgaatctctttgagctttttatgctttacactgtggattttggagtttgctttggtttttccactagttctttaagttaaatttaggtaaagaaatttaaaatcatcaggcttattcttaaaaactcaagtattatcaaatgatggatgatagagatatgctttgggaatatatccaagtacttcaaatgatagaagttagaacaccaggagacatttagtaagagattcttctgctgggtgaaatcaacatcaacatcacctggaaactcgtgggtagtgcaaatcccctggcctcaccccagagctcctggaatgaagctgtccgggatagggcccggcatcctgtgttttaataagctgtttgtgggattctaatgttcgccaaagttttaggatcatgcctgcagagaatcctgctcactatgaaagtttgcatgcctgagtaagtcaaaagagatctttgaaaatagtatctaggtttgagagacttgctgtgattgtataattttagcaaatgtgtcaaaacaaatttttacttgcaggcaatatcttgttagtacagagaaataaaacaaacaaacaaagattataaataagaacaaaagtaattcatccaagagccatgtgaaaatgaaaatccttgaaatggaaaaaaaaaaaaaagtttttcagactaccctgtggaagtagtaagttacattgaaaggccgaaatcagccaagatcattttttgttgttttgttttttgttttttgagacagcatctcgctctgtcactcaggctggagtgcagtggtacgattttgactcattgcaacctctgcctcccaaattcaagcaattctcctgcctcaggctcccaagtagctaagattacaggcgcacaccaccacacctggctaatttttgaattttttgcagagaggggttttgccatgttggccaggctggtcttgagctcttgacttcaactgatccgcccaccttggcctcccaaagtgctgggattacaggcatgagccaccgtgcctggccaggccaagatgattcttgaagtgtgtgtgctgtgcgtactgtgtgtgcatgtatacgtacatttctgatggttcactttagtgatactgtagttcagtttatctgggattgcctcagtagaaagctatactcttacttgtttaactttctgtctattttctcctttaaaaaagaaaagattatatagtagacttatacttggtatctgtctgaaaaaaattatatgaaaactgtctttattgccagggaagcacttgtactttcttttctcatttattcttttctgcactttaatattacagtttatttgcttctggctttctttcataatttatcagaaatacaggcttgtatagaaatcaccattttttaaataaaattttatttttattaaattattgtgagctcattgttttttaaaacaatcatacacaagtaaaacatttaccttgggggtgggcatcagttccttttcccatccgttttcatctctagttttctttcctaaaaacaagccctctcaacaattctagttaattctttttctgatagttatcttttttttttttttttttttgagatggagtcttgctctgtctcccaggctggagtgcagtggcgcgatcttggctcactgcaacctctgcctcctgggttcaaccagttctcctgcctcagcctcctgagtagctgggattacaggcacacaccatcacgcctggctaatttttgtatttttagtagagacgggatttttaccatgttggccaggctggtctcggactcctgacctcaggtgatccgcccaccttggcctcccaaagtgctgggattacaggcgtgagccactgctcctggcctctgatatttatctttatattttctatataacatgcatgttctgctgtttcttttttaaaaaccttttattttaggtcttataggaagcttgtgcattcatttattcaacacataattattaagtacctaatacattctgtacattgtgctaggttctggaaataaacagagaatagaacagacatgattcttatccatggagagcttatattctaaagatgctaggaagtacttttaaataaaactctgacttatatataaaaacttcagaaaagaaagggcctgcttttaaatattttttttggtgttgtccactacttgaacttcatcaagttcatcagaaaaaatttaaatggtatttctaaataagtggtttgctccactctatcattaagcttgttaagatgaataaaaatcagaatattttcaaatgtatgtaaatacatacattcagtgtatttcccagcttcagaaagtcctaatttctgaaagtccttgttatcaactcttgttttgaaaggaccctttctttaagataaagtgtcacatacattattttgtattgatacaaattattgatgattatggatattttaggtaatcaatactaagataattatgttaatatgaattatgattatagggtattggtaacagacaggagtgtaggtgaatgatatgaatttgcactgagtttgtcatgcccagaaagttaatctgagccaaatttctaaaaagtgccttccttattccatattatgtatgaaagaagagcatagtttatgtgtgaatatatgggcaacatgtatatagatgtccacatgaactgcgcctggttaggtcctagaaaagcctatggtgggaaaggtgggttaagaggattgaagttaggagtgaacttgttatagtcttcataaatatttttatagccagtaacataaaacaataaagacagtgctccaaattaaagatacagcaatgacatgacatctacatttgaaactagtaataatggatgccgggccctattactaatttctgcttagcattccttactcaccagaaatgttttaggatcttagttcctttgcagcttgggatgcttgtaaattcacttgttcttttataaataatgtgcatacaaggagattttcaacagcattttcttatcaaaggtctgggcctatagtcaaatagtcaatgccatcgtggttttacagcacccatgaggaggtgttgacgttcaggttttagcttcaggattttgacttgtgtcttcttcctgcttgggtcctgtctcttcccacctccccagctcagccttcatgtacgaattttagattcttttgccttcgtatcagccagcagaagctagttttttgttttgttttgtttttttcaaggcctaggtttccttttactcacatctttcttcaagctttatttgcaaacacctccattcctcttgccattacttttgcttcatgtctatttcaaaactctgtttcatctttttcttgttactaccaataggagtaaattgagtgacttgcaattaaggtacaacagaagcagaattttcaaagttactcaaaaggaataggtagaaaaattcccatggtaagacaactcagtaaataattacatacaggcagtgaccatatatgctcattttaagttacaaatatacacacatggccataaaaatagtcagagactgagctggaactcaatccgtaaactgattccaaaccccatgtaatttttatacacagtttattgctagctttttgtccttttatgttcacttttatgtcctatcttctctatattcctaagttgcccacattttaaaatctgcctgtcttctgactttttaccacaagtgtttttttctcatccacttttattattctcatttcctgttttcaaagaaacaattgcaacacattttagaaatgcttacgacataagtggcacactcctgaagtctttccaaaatctattttcctccatgtcttaatttttgaaatttatatacttagcttctttctgctaattcccacagaaaaactcagcacaattttataagcaatgtgaatgatcttagagccctcataggaataaattgcacagaatgttatcaatatatcataagtgaggtacaggattaattttctaagatatcatttaaaatttcttctattgttactatacacatttgatttattaagccaaaacttcattcctctaagaataataatcccgtcacagttctaatcctagcatagtgtcgtcttaactgcaatgtactatcctaactttcaattacatcttatttcagctttctttattatacagtagctaaaaatcattgatagttataaagaccataatgccataacctctcaaatttaaacaggatagaatattttatgttactaatacagcaacagaggcattttcctctgttgggtagatgcaattattcagattccaagtggttgagacattccataattatgtctctaattttacattctacaggcctcatttcctctgtctgataactgtcctcacccaagggtttctacaaagtcacagtttgggtgaatctgtcatctcattttttcaaagaaggaaatcatcatcaaataaaattatacacaccaaataaataaatatcaaataatatattaatctacaaatttgcgacatatttattttctgactttgaggttaatttcgccaccatttttcctaatctgtatatcctatccccacttgcaaacaatgttttgcctgaaccgagtaatggcaacatttatcgtaagtatatcttagcttcttctccttatctgaatggggttctagttcccttagcattctcagataacattctgaatattctactctgtatatccagtttgttcatagacctcaaaatgcagaccctgcatggattattcccattctgctgtctgtctttatgaaacctgccaatacttattgctagatgaaattctacagatgttccatgatgacttattgactcgataacagggatctgcaaacatttctgtagagacccaactctgcagttgtagcacaaaagtagccacagacaatttatgagcaaatgaatgcaagtgtgctccaataaaactttatttacaaaaacagatggtaggcaggatttggcttatgagccgtattttgctgacctctgctctataatattccttgaagagatactattatcccaatatcctgacataaaatatatatccttaccatttgctgtagcaatattcaatttttctttacctggcgttgcttatgttctccagccagttctgtcttttcattaggaatctgagttaggatttcttagaactatgtatttgggtaagtttatcaaaggcctttttatttttattttttattttattattattatactttaagttttagggtacatgtgcacaatgtgcaggtttgttacatatgtatacatgtgccgtgttggtgtgctgcacccattaactcgtcatttagcattaggtatatctcctaatgctatccctccccgctcctcccaccccacaacagtccccggtatgtgaaattccccttcctgtgcccatgtgttctcattgttcaattcccacctatgagtgagaacatgcagtgtttggttttttgtccttgcgatagtttgctgagaatgatgatttccagcttcatccatgtccctacaaaggacatgaactcatcattttttatggctgcatagtattccatggtgtgtatgtgccacattttcttaatccagtctatcattgttggacatttgggttggtgccaagtctttgctattgtgaatagtgctgcaataaacatacatgtgcgtgtgtctttatagcagcatgaccttttaaagatcttaggagcataatgctgtaacctctcaaatttaaacaggatagaagattttatacattactaatctggttgggtagatgcaattattcaaattccaagtgggtgagacattccgtaattatgtctctaattttacattctccaggcctcatttccctctctcatttcatcaggtcttcaaaaggcttttaataaacttacccaaatatataattctaagaaatctcaaattcagtgcttgatcagatcactgtgtggtatagtttgtatatttttccccacccaaatctcatgttgaattgtaatctccaatattgggggtggggtctggtaggaggtgactggatcatgggggtggatttctcatgaatggtttagcaccattccttggtgctgtcctcatgataatgactaagatctggtcattttaaagtgtgtggtctctctctctttctcttgcttgctcgctcctgctttcaccatgtgatgtcccccactactcctttgccttccgtcatgattgaaagctccctgaggcttcaccagaagcctggcagatgccagcatcaggcttcttgtaaagcctgtagaactgtgggccagttaaacctcttttcttgataaattacccagtctcagttattttttacagcaatgcaagaatggcctaacacaatgtgtaatctttgtttcatagagtttacactacagctttgccacctaactctcctatgttagtacatagaatttctgaaccttcaatcctgttcagaatgccagattgtgagagaatcagttatgcttcaaccttgaaagcatggagttctctgctttcagggaactccagatgactcaggaacagaagtaaaccctagacaaatctaaagccaaacatagaataaagctgaacagcagatcataaatcccattccttgctccctaggaatacctcttcttctaactccagcttcagatttttccccaggtttcacaattgacctttgtcttagtgtccatactggttggacatacccctctggcatagacattcatgataggcattgccattcttcatgatatgtcattcttggctacttcctctttttctaggatgcatgttttagctcacttcatgttcaattgccttgtggttggcctacttcttctttctcttctttcctacttttgtggttgctttatagttgactaattactagttcatcggctctgcttattgcctaatactataaaagttcccttcctggaagggttggggatgggaaagtgggggtgggtggtagtaaaattaactaaactttgtagtgggctggagatagggcatgagtaaaggaaaagttgtattttaggactgctcaactgcatggatatttatactttttaagacaagcaacattaacaaagtctggatcttaaagtagagatctacactggagataataatatccctgtgggcatttaatgctcatggttacctagaaaataagtataaagtaggaaattttgagagagtattcttgtaaagattaaatggtgacaccaatgtaaggcttgaatgttctaataagggtgaaacttggtctgggaatggcagttcttacaccttttataattcttaactgttattttttagatctggtcatttaaatctgaggacccagatatgctagtcttatagaaagcacaaatttaaaatgggttctttgtcttacatagctctaaagtttaggaaaaaagtatcttcaagcaaccttcataggaattctccaaaataaatgtgttcctgattaatatgtgttttattttttaaaatttatttttaattaatttttaaattgacaaaattgtatgtatttatggtatacaacgtgatgttttgaaatatgcatacactgtggaatggctaaagcaagctatttagcatacgtgtcatcatctcacataccatttgtttgtggtgaggacatttaaaatctactctcttagcaattttcaaataatgtaattattttaaatcagttgtttaaatattatgaaattactttcagcccttagagaatagtccatctcacatgacacataaaaatggaaggaggtgtctagctcaggagaaactttttggaatatttgattctctttccctcattttctcttctttttttgttttttaaaaaataatttttaaaccctgtattgactcctggctattattttgaatatgagtgctaacaatttgagccttgtagataactatcccaatgccaattgaaccataattttcatttgtctctttctacaagattctgaattttttcagaagtgaaattaagtctcaattccctataatttacccagggcaataaatcttaaacattttttcttaaaaaaacaaaacaaaacatttttactggaaagactttatggggtggacattaactctgtaaatgccatataacttttggagagggctgcccctggcacagtgtaatatttatgagaaagttgtgcccatactaaccacctgtatgagaatcgcctgcgatgcttttgtttaaaaggcagattcttttttccctatatttttctctttttaaaaaaataatttcgacttatattttatatttatatttatattattttaaaaaataatttcaacttatattttatattcaacctacgtatgcaagtttgtcatatgagtgatattgcgtggtgctgaggtttagggtacgaatgatcccatcacccagatactgagcatagtacccaatagttggtttttcaactcctgttccctccttccctccctgctctagtagtccccagtgtctgtttttgccatctttatgtctatgagtatttgatgtttagctcctacttataagtgagagcatggagtatttggttttctgttcctgcattaattcgcttaggataatggcctccagctgcatccctgttgctacacaggatgcagtttcattcctttttatggctacatgatattccacagtgtgtatatactacatttcctcaatgcagtccaccactgatgggcacctaggttgattccatgtaaaagagcatattgttaggcttttctctgaattactgaatcagagtctttcaatgggttccatgaatatttcatattcattttagtaaacttgctcaagtgacttatgtatacagttataggtttgggaacctctggcctggggaagttgtctgcaacaccactgacaggtccctgtcctgccacagacatttctgctgtaactccatgcttgcattttttgggaaaaacaaagcaagacaaaacaaaactcattttgcaaaatgacacacaaaataaagaggcttctggaaaaagtagggctaggtgaagagaattcaaaacttacgaaactataaactgaacaccaacaagaataacaatgaacctaataaaaaactagcatagttatggctctaacaacatttattctcaacaacttagttaaatcgttgtacccttaaaccttaacactttttttttttgtttttcgagaccttggttcttgaggacattttcttctagcagaaatcagtattaacttctttatccatctctctcttttttttaaactgttatgtaccatcattatagcacttcttacaaaaatgaggagctgtctttgtaacttcatctgtgccatcagcttttccagatagtttaacataaaaggaagatgaagtggttctggaagcaagaaaaccagccaccacttgcagtaaggaaggcaggtctatgggcctattagctcatggaggtttttgtttgcttgtttgtttgtttttgagatggagtctcacacagtcgcctggtctggagtgcagtggctccatctgagctcacggcaacctctccctcccaggttcaagcgattctctagcctcagcctcctgagtagctgggattacaggcacctgccaccacgcccggataattttttgtatttttagtagagacaagatttcagtatgttggccaggctggtctggaatgcctgacctcgtgatccacccgcctcagccttccaaagtgctgagatcacaggcatgagccaccgtgcccggccagatctttttaaataagatcttcatgtgttataatactaaggttgtctctttaatcacaaaaagccagtcctttattgcttcaaattgttcatgtgctgatatcatatgtctattgaggtctgacttactacattaacacacgctggcagaaccactgcagacattctctgtcctccttttttttttttgtcactaacatgataaaattcttaagggtttgaattctcagaggtactgtctgatggttaaatcacagaggtccactgcattgctgatagatttttttttcaccacagtgctgacaatacaattgttcaggaatggccttcatgaccataaggttggtttgacctaggttcttaattgtgatgtctctatagcttttaacttatttcaggatgatttcccccattgcaaatagataattgttcaatagatttgctgcagacttttggacctgatctatagttttcccttgggatatgtaagatatttgaggtacaccaaagtaatgcaagaaatatctttctttagagctagagtttagacaggaagtatgtcatagaactatggtgtgtccttcccaagtgagggatttcattagaccttgacttagaattgaatgtaatgttaatctgtaaaggcttgttgtgagggttttgcttaaatttttaggtttattaaatttttaggtttattaaaattcctaaatgatgatatttttatcagcaaagacaaaaatactgctacttaagtagtagtcactagaaaaataatttattttgttttgttaccttaactgtcagatttaagcacattcctaccaatatttgggtttgggctctgaaacccaaaacttttgaaagctttggaaaattttgtagaagttctttcttctgtcttttttttttttttttttttttgkatactattgccactgggatgcaagcattcataaattatgtttaaatataaaaattaggtcggtaactctctgctcgtggattcctgaaacacaatgtacaaaaacccagaatagatcttcgtggctcactttagagcgtaacagcactgggaggtgatctgacttttcattttacacgcaagaaactgaggctggagagaaagaagggttgtctgggtcacaactgttgaggtcagcctctgggattgaacttcatttcctgaattcctcatggttttccacctccattcctcagcttctgtgatccctttggtatggggctgtttcttgaaccttgaataggagggtatggaggtgaagtgacatgtgagctaattcttttacctcactctggtttatctatttttatgtactaaggtcctgtgtattaattaatgagatgagttccacagttgctaatattagaaaatcaacacaattgatttctccttgggaactgtattagttttctattgctcctgtaacaaattaccacaaactttgaggcttaaagcaacatgagttcatgaatttattatcttagagttttaaatgttagaattctgtgaggagtgtcactgggctaaaattgaagtgttggcagggctgcaggaggctctaggagagaaatcattttcttgcctttttcggcttctagaggggcttcccttcctcttacttccaagccaacaacatgacatctctgagtattcctctttaactgcaccaagggaagataatctccttttaaagattcacaccgttagattgggtgaacctggataatatagtcagcccttcctatgcatgagttttgtagctgctgataaggaggtcatctgtaagcaacttgaacatctatggattttggtatctgcaggggatcctggagccaatcccccacagttagtgaggaatgaccatatagcataatttccccatgttagtatccttaatctcaaggtctcaatcatatctgtgaagtcccttttgctgtgtaaggtaacatattcacaggttctggggatcaggatttaggatctttgggagccattattctgcctgctacaggaatgaatttgtttccacttgtctcaactctaagtgggcagttatttaaaaactttgtattaatttagagagcttcataaaatgctaaaattttctgagaacctaagtgataatataagaagaatagctaccaacatttgttgagtgcttgcaatgtgacacacactgactgctatgtgctttaattgcaatatcttatctaatcattttagtagccctatgagataggttctatttcatttacattttagaaaatgtaaaatgaggcttagagaatttaaataatttgtccaaggtcaaacaactagcatatgggagactaagacttgaaattgggtttgtctgacccaggcttttaatcagcatattgcactgtttatatgtagctctgaagtggtaaaattgtaacatagtgtaatgcagtactgagaatataatatcttagtaatttttaataaataagtgttttagtaaggaaaataagttgttattaggaataaacactttctaaatgacatagtacccattgagcagtgttcaactgattaatattagttggttatatactgatttagtgatcagttctcaaagcctcaatttaaatagaaaaggagttatgtggaatttaagtggaaaggatatagctactttaacaattttttgtgctctcagattgtaaagaggaaggatttattttacaaataaattgcttgtgaaagaaatttaattggttaataaagtctctatctcttgccccctaaccagaatgtcaactccaggagaacaaggatcttggttttcatactcaattctatatgtccagtacttaaaacagtgagagcaatgtaactgatgcacaatgatatttgttgaatcaatgggtactgacaaattcctaagggaataaagccagttatctacatgaataaggcaggatctagatactagctgcatgccagaagaagaatatagagcgttctaatgtgtttggctaggaacagaccatatcatgggctaatatgatagagtaataaaggtagtgataaccctgataaattcaatatgtttttacataaatcctgtgcattaaactagtagctcacttgatatggagtgtttgaatcacagattgactttgctcattcgttcttccattcagtcaacattattgagcactgtgctagttattaggataaaagatgcattaaaagaataaagcccctaacttccaggagcctctgtctcctaagtgaaacaaacatgtgtaaagataaaataccttatattaaatggaataataatggttttatagaaacatggaagagggatacttaacttattattcaaaagagacacttattcgaaagacataaattgagtttagtcatcttgagttttagaagaaataatttttgatttatggagggattgcaaatataggacagagagttctcctataccctttattcagctcgtttaataatacatagctttgctatattgatcaaaactaagaaattaacattggtacaatactattagctaaactgcagaccttacttggattgaaccatcttacagccttttgtgctaaagggaaattgtgtatgaaagtgctttgtaaacagtaggctaaatagtggtagtctaagaagtgccatctggtgagcccagggtaggtcactgagggtgaaagttgcattctctgaagggagctttaaataatctaaccatgaactctattttattttattttattttattttgttttgttttatttatttttgagacagggtcttgctctgtcacccagactggagtgcagtggcatggtttcagttcactgaagcctaaacctcctgggctcaagtgctctgcccatctcagcctccggagtagctgggaccataggcacatgccaccacacctgggtaatttttgtattttttgtaaagatgatgttttaccatgttgcccaggctggtctcaaactcctgggctcaagtgatctgcctacctcagcctcccaaagggctgggattacaggcgtgagacacggcgcccagcctgagctctctatattttagtttcctttaataacatgatcagttccacccatgaatttaattaattccttatgagtttgctattaaaataaaatgagcggttattgatgcttattgtgtgtgtgacagtatcctattcaaagtatgggatacagttctttgattctctcactccatcctgtggaaggtaaacttaccttgcagatgaggatgaagttcacctaggtaatagatggacttggccaagccatgagactttaggtgggaaaactggaatcagaacctgagccaacctgacttcaaagcccaagttttctcctttgtgttgtctcctgagtcattttcctgtatagccccgctgaataagcattttccaaattatattttgtattgtgcaaaacttcacttccttttttattcaaagactatgtatttcatgcttcaaggttttctgagaactgcagtattctgcaaattctcaaaaaatgcttttgctctttctaagatttcatgactttaaagaacagttactttcttcctggccttcctggtgtcagtctgtatgattctataatgtttagtgtattcctttatattggctgccctttcctttgagcatttcggtaacttttcttgatagtttccagctactttttttttctttttgtctctcaagaatgaccaaaagtatatgtagtttttcagatatttgtcatgtaatttcgtgccatctagatttatataacctaacattttctggctttttcttagatatttatagatggtggtggttaaatcagagttaataatattaatttttaaaatatgcaaaatgcttttattgctctttttaattaggtttttacaactgtattgaaataggtgtggcaggtgctatttcccctcctttttctgctcaagatgattgagattcagagtaattttgtgactgcttcatcctgcagaccaaacaagtactttacctaagtttcctgtctccattctttttgatagggtctatcaagcttgtggcaaaagctcaagatgttatgtgtagagttcagtaatttaaattcatggacttataaactattaacaaagaatctaattaaccttctttctaagtaaaaacaaacaaaacaaaagatacttctagtagagtgccagtgtctttagggattcatggggaattaattaaattcatggttggtactgatcatgttattaaaggaaattaaaatctagagagctcatggttaaattgtttaaagctcccttcagataatgcaaatttcaccatcaatgccctaccctgggctcacccagaaggcatttcttagactaccactatttagcctactgtttacaaagtactttcatacatgatctcattgttcagcacgaaaaaagctgtacacaagttggtgcaatccaagtaaggtctccagtgtagctaatagtagggtaaggaaaacgatatgttgacatgctaagtgagcttcattttgacttctttcgtgtaacatgtttgagtctttgtgctgagaaaattgtattacattctgggagtcagtgggttgtgtcagaatgtgtgggaagcagctcactttcactttcaaaagattctttaaggaatttatgctttttgtaaaataggggagactatttggactctttcttattgggatttctttttgtgtgttttatgagaccaaagggcactgacttccatcatacggtttgactttggaggacagtacgggaaagtgcagcagccttgtagttatagtggccacagaatgtagtcacagaataatgtagcaccaggtttcttactgtcaacaatctgtttaatttgattttggttattttccacctcttcagcaaattcatgtcactgggaaccctaagataaggaatttgccttccctgatcttcctgtggggtagaagtaaaatgataagaattcaatcgttaggttgtccatggacctgcttaagagtgcaaggaggttttaaaggtccttagaaagtcaaatgtggaccctgctgaagaagggatgcagcgttgcttacttaaaactgtagtgaacagagaagagagaaatttaactttgatattgtaggcctcaacgagtaaagaaggctttcaatcctggcaggtactaaggttttagtatcattctctttaataagtcatctgtggacaaaaatgaaaaaatcagaaagccataattactaagaaaggagatctgactaaataacaaagaaacagattttagaagtcctgaaaggacacatttgtttcagaattagctctgctaaaatttttctttttcacagaaggaataagctttaaatggctatgtgaaaaatagattatagggaactaatgttcttagatcatgaatcagggactttgttcatttatatgcactgcttaaaagttttcacatagttatcattgtttaaaactaattataatcaattgctaactcatcttacctgggaatttatttagtttagaacatgtaagtaaatttctttaaataaaaaagagaattttagtggcatgaattaaatgtaattcaacttgagcaaagaagaaatggttataaagacaaatattaacatatcaaaatcatgttaatgtgctaactttacctaagcaataaacacatcagaacagaaaaaaacttgacaataagaaaataagtaaatatatttttaatttttagtaactagatgtttctcagtttttctgtttaacattttggaagtgaatatggctggtatgtataatgcataagaaaaaaatcctgttttatgacaatggaaaaaatcatatttataagcttatgtcatgtgaactttgctacacatcaattaggtaaaactgtactggatccattttaaccctgtgagttgattgctttcagtgaagcttgctggacatctttatgtccgagagtgagatgttcttataattaggggcagctgtggtgacagaatcaattaggcaggcctgctgaacacttaccttccagctgctggccgcggcgcagtgatttgctccagcattcattgtcacggtgtattgcctttacacctcgaaagaacaacattaatccattaagccacttttgttgctgtatcctcacgtgggggttatcacatcgcagtgaacacaggagtgagatacagcactgttcacccttgtggcatttggcatatgacagatagacagctgcatagttcaaaagaattattttaacaccaatcgcaagtattgccttgttttatttccccatcaattatccaagtagctcagaaaattcagcaattttgcatatctactgtatttctcagactgtcttttgcacgtggaataagtgcagaaataatgtcatgtggtgtatcccaggttttgtgaggaaaatatggaccctattgatagatcattaaataaaatctttagcacattgtctggtagttaagagccagggctctggagtcaaacttcctgggttcagatactgacttgatagtataccagccgtgtgactatagacaggttactttacctctctgtttctgtttcttcatctgtaagttggtgataatggcagtaatacatatctcctggagttatcataaaacttaaaaacgttaatgagcataaagctcttagaacaatgcctggcacatagtaggtactcaagtatcagctattattattcaaaggtgtttattgttgaaagtactatatatatatatatatatatatataatgtgtatatgtatacattacattctactatatatactatatataaatatactgtaaataaaaaggactttatttaacttcatctcataggctttggaaatacattatagttgttttaagatttttatctttagtccctaactgtgaagtacagggcaaggaactgtatagaaaagagagattgctaatttcaataaataactaatttcaattatcagggtgaaaaattatctcacctaataaacctgcattcattttcccttgtagaattttacagtattgtaaatttctcacagacaaatgtggagaggtgatttggtttacatagctcattataagaacaaaaaatttactgtagtggctatgaaatggagtgatctttcccagatttttaatctactgtccttctctccattttctgcctccacttcaaactttgtagaaaaactaggtatggtaaaaagtcctaggtttaagttttggttctgcaacttgttagacttacgacattaagttcccctatcagtttccatctcctcacctgtaaatggaaacaatcattaggtaccttacatgaaatacacaccagaactgttgcagatgaaaggagatttgaccaaatagtaattttgcggatatgtagtgacaacaaggcacattaacagttaagggagcaaaccagcatcttgtagaccatggtcaatcaatggagaagagcaactttgacttgagggcataggaggtatggtggctgacacttataatcccagcactttgggaggctagagcaagaggattccttgaagaggattgcttgaagtgtttgagaccagcctgggcaacatgaatctctgtatacaacaaaacaaaaagcccagcgtggtggtgtgtgcctgtgcctgtggtcccagctatgtgagaggctaaggcaggaggatcacttgagcttaagattctgaggctgcagtaagctgtgatcacataacaccactgcattctagcctgggtgacagagtgagactctgccgccaaaaaaaaaaaattaaagcagagaaggtaatgtgcttttcttgcaataatacaagaaccgtctgaccactctgggtagactctgaaattaggtgaaataaatgagctagcaaggaacatgaccagggtctcggctgaggcagggtccagtttgagagtcctccaacagtgatggccagataagagaaatacagaacatgaaaacttcaaagtaaagataatacgacttacttgacaattttccagttagatttacatgtcatttttgttagtgtctgatggcagagcggcataagagtcctagcccagtggcatgcagaacacaaacaatgtcacagggcctcacgattccaaataataaaaagtcatagagaagatagatggggcctctggaatcattttgtacctgggtttcttctttgtcagcatcttccagattcttcctcatcctttcagcagacacttgaagtcctactttgggttaggagagcctgagatcctgtatatcttccattcaataaattcagaaattttgatgtttaggtatagtatcaatccaaatggacacatacacagtcaggaaatagcctaaccctccaaatagagactgtgaccccctgctattaacttgctgacccttgtttgatttcgtagggataaattccttgaatggccctctgtttgtacatgtgggtttttttgttttgttttgttttgttttgttttgttttttgagacggactcttgccctgtcacccaggctggagtgcagtggtgtgcccactgcaatctctgcctccccagttcaaatgattctcgtgcctcggcctccctagtaactgggattacagatgtgtgccacaatgcttggctaatttttgtatttttagtagagatggcgtttcaccatgttggtcaggctggccttgaactcttgatctcaagtgatccatctgcctcggcctcccaaagagctgggattgcaggtatgagccaccagcgcccagccctctacatgttttttaagtgcagtcagttgagtatggttttcagatggagaatctgattaatcatcttcaatggccttagcataagcattctatttaactgagctgattgtggctcataccctcaaatcaaatatcttaaagaatcatactgtttcagtcatcgtgtagcagttaattgtgagaagtgaaacttggaggacatccgtatgtaaaatcccccaccaaaggaaaccaatatgtttgggaaatcaaaatgaagcactagtaagaagccaactctggctgtagtggcaccactgtgatgagtgttagcataaaatgctgaaatactgcccccaattttattcttttatgttgtataatgaaacgttctatgcatgttatgtgcttgcaaagaaattattcagtagttcatatacacatcgttggattacataaggagctggacatggaactgctagaatggaatttccagagtccagccatcttaaccctactttgaagcctattcccagtgtgtttgctggttggatttagtttgctgccagtggtaaagagagtcagcttgagaatatattataacaaaatactgaattttatggcaacttttatttcaaatgaaggtgccatcctccttcctcagtagtcagggacaaatagcagctccattccagctcacagggaaccctatttaacttgaatcaagaacattctgtctaagcctgattcagctagagcacagggcggggtgagcacaacatcaccacaggtggcaacaaataatgatcttgttgggcgattcgggatataacccaacatcacccactgcgtcagtagcagggcattaaaacctagctgcattccgaaataccattaccactagaatgtgctgccttttacacagctatatttacacatttgataagacaaactttcccttttatagccaaatttgtgagtgcagctcagaagagaagaccagatggaagagcacaaagtttatccactctgttgcaggactgtaatcaacttcgtgagatagtacaaggagagagaaatatgactgggggagttttggagactctccatagtaatttatctacttctaacatgactattaacaaaaggacatcctgcatagaggactgattaatggtattcgtgtggctttcattagctaacataattgtcagtcaccggttgtcactgtgggatctgcacatatgtgatggtgggctttttacacatttatgcagggaagacttagctgggatcatagctgaaagctcattgttacttgataacattttgcaggtttcctgtgtaatttgttcaatgtgttgaggctcttcagattagctgcacaaacgtggagagtaaagatatgagctagctttgcattgtcagatccttcagagaccagaaataacaacttacctagtgtcacatgccatcagcatatctctgcagcagacacatgctaaaatttgtttcctgttcttaacaatacagtacaatattcgatatagctgcacgaataatatttgaaaaataagggcacagtagatgatcaaaacaagaggattgcttagatgaatgaggttgtttttttggaaatttattttgcccttaccacaagtattttttcacccattaaattattagaataaatgaacatgttgcattgagtttttgtggtggtcagaatatgaaatataagtatttttggattacaaccacatttttcttccctaaattgtgtgacatagcaaataggaaaagcagaacacaaaagtagactttggaagtatactttgcatacctgcatgttttgagttagagtcagaggagtatatttgtgatcttttaagatatttgaaaacacttaaagcctgtaaagagaagtattcaaaagaagctcctgtgaaatgtgtggcattgctctgaaagcatttgcatgtctgttttaaaaggctgttctttgcactggactgtctgcctctgttgatgcatttctaaggatgtggatatgtttatattaatgtcaagcaagtttgaaatagatttaggcacagactgcttaaaacttgctctgttattaaattgtttcagggtgtggaactaccgcctctctagaaacacatagagagcaaaattatgaactgcggtagaccaaatacaattaaatcatgcttaagattctcggaacacctcctgcatttgaagcattaacttagccttgagcttgccttcaactaatttttaattaacagaccttttatgcttagataagactttcaagacaagtaaaaatttttttgcacttttaaaattcgagtacttacttaacaagaattgaccctaagtttaggaactaccattggccttataaagttattcctgggtattagaagatacttggtgaataggttttatttcagtgaaataaatgatattgtttcatgtgagtaaaccatatgcctgagaaacacgtgtacattgaaaatgaattctattaacagatagctatttatataatctctgacaaaaagaaaatttactctgttgaaaattgactcattatggatagatgaaaaaaagtcatacaaaccacatgggctcaaatattagtttgcacttttataagaatctgtgaaatattcagggctattccagtagtcctggaagacaaaaagtttgaaaaaatatccataaagacaaaaaaaggtttaaaatttttgccctgtgtccttgatacttgaatttgagctctgccctgagtgagcgagaacctttgtatggtccttgtctagaaggtaccactgacggcagaacatccataagtcaaggatgcaattgtgcagctctgttggtagtacacagatgtgtttcttcacttacgctatggaggattttgagttatcaacttaagagagctgttttctgaaaagctggatatcctcatgtcatagaagttaccccagaaggacgcagcagggacattattacacctggacttctagggatgcaaagttagagtagctgtgagcttttccacatctgatgattttggaactatgtgcaagagagagaaattcaggctggtcactagaggtatccttgaaccgcaaacatcgagaaatgttcatacatcagggtcagcttaagaggggatattttagctaagaaggaccttggatctgaaggtctctgcctcattgcattgtagatcatctcgtaaggcaaggaatgtaccactctgcatatggaccccaaaaggaaaggagaagtgttgacctgcccaatgagtgattggtttccttccatcaaaagaccatagtggggttggggccctgaagtcacgattgtgaggatgaaccatgagcatttcagtgcaataccgcttgcagaatttaaatgatttaaatgaatgtaatgttattattaattaaatttaacttataaattattaactcaaatatttacaagaatttctttcatgaatgcaaattaaccaagagtttaaaaatacttaatgacatgaacataaagaagaaacctccttgagagcggagggtgagaagaacgtgacgattgaaaaactgccagttgggtactatgcttattacttggacgatgaaatcatctgtgcagcaaacccctgcaacactcaatttacccatataaaaatctgcacatgtaccccctgcacctaatataaaagttaaaaagaaaaaaaagaaaaaagaacagactaatgcacacacgcacacacagacacacatacacacgtgcgtatttaatgaagcctaggtcttttatctaatggcagaaagatcagatgagaaaggcagaaaatcagagacagaccaaggctcccggtttttttttttttcctctgtatgtgttagcatgtatatgtgtaaatgtatttctgtttgctaaaccatctaaagtttagttgaagacatcatgacatttcacccctaaatgcttaagcagatattgtctaagaacaaggagattcctttgcgtaaccacaacgcagtgctcctgcttgagaaatttaactttgatacaatatttttattcagatttccccagtagtcccaataatatcctatacagctctttttcccttggagcaggatccaatcagtagctccacattagattgacttgccatgtctctttaatctcctttaatctagatcacatttacagtcttcttttgttattgatgacattgattttaaagcctacttcagttgttttatagaatatctctcattttgaatttgtcgtattgtttcctcatgtttgaaatcaaaacccctaatacagaaataaataaactaatgaagacagaaggtgaagaggaaggagagacgagctagagagagaaaagaaggaaagagaggggcaaactgattttatgataaaatgtttatcaaaggggaagaaaacaaagtctccatagatttatgctcagactatattgataagcaaatatatggagtggtaaggggggaaacatggtccttaaagagaaggtatctgaagtatagttgacactcagacaatgtaggcattaggggtgccaatcccctgtgtggccaaaaatttaagtataacttttgactccccccaaacctaactactaatagcagcctactgttgactggaagtcttatcgatcacacaaacagttgattaataaatatttttaacttatatgtattatatatggtattcttataatacagtaacataaagaaaatattacaaggaagagaaaatatatttattcatcaggtgaaagtggatcattataaaggtcttcatccttgtcatcttcatgttgagtaggctgaggaggaagaggaagaggcgggcattggtcttgctgtctcaggggcagcagagacagaagaaaattcatgtataaggcattttgcttagaggcaagggaataaaccttggaagttctggtgtgttcccaagttaaatgtaaaatccagaggggtgaagaattcaaactagttatttcagtttataataaattaatgaggcaatgtatttttttaatatgtgtaaaccagtttttggtgtcatgtagcaccggcagatttgtttctttaaaacccttcaccaggccattggctcacacctgtaatcccaacattctgggaggccaaggcaggcagattgtttgagcccaggatgtggagaccagcttgtctaacatggcgaaactctgtctctatgaaaaatacaacagttagccaggggtggtatcatgcacttctggttccagttactcaggaggctgaggtgggaggatcacttgagcccaataggtggaggttggagtgagccatgatcatgccactgcactccagcctgtgcaaccgagcaagatcctgtctaaataaataaataaataaatcccttcaccaggctcacaaaattaaaaatgatcttaaggagttaacagaaatatgtagacactatttcagataacatgagaatttagtctgttttaaaaaacctgcaaaacagagattcatgaaccacattttaaaaagacttctatgaaagctcttcagaaaaaaatattttcaaggtgtcaaaaaaaaaaaaaaaaaaaagaaccagacaaaatattcaggtatcaagggctaagaacagctaaaacatgttttctaatttgccagtggccagtgtgtcaactacattaaatggctgcttctccacctcatctcccagccaccaaataaataataaggggaatatgtagctgtaggggtactgctaagaaatcacagcattcaaatgatttttttctgaaatttattggaaacttcgtatgttcattcttgacatttttaggatttacttggcaagggcagaatcgtagaaaaacaaatagagttccctgagtaggaaaggtctccatttcctgttcatggttaggtgatcctgattactgtccttggagtcttgagccccttacccggtgaataattaggtacggaatcagggaggtatagactcatttgcctgggtttgttttctgggagtttctgtttaacattcctgaactggagcagaagtagattttgtagctggcttttctgagactcaggaaacagaattgtggaattctcaggttctgtgacatttgttgattattaaagtgaaattatgtgtgagaggaaaatttattcatctatgcttttaagaaatgtctatgataaacagaattagacatactatatagaattgcataacacaccaccacatgtccgtattacccagtttccacagttatcagcttcttggtaattgtttttcacctttatgcctatccatttcccaccaccatattattttgaagcaaatctcggatattgtaacattttatctgcaagtatttcggtacatatttttaagcagtcttgcttaaaataagaatggtatgtaggtgtttaatgtattctccaagctaatgcataatttaagtactcacagtctctgttgagactatttagatgcactaaatccaatcaaagagagaatttgttgtgagtagtggtcatctggaatggtccattcattgtgtatgggatagaaactctgtaggtccagtcaaagagtgatagcatcagagaatttctgtcttgaagaaaggagccattgttaagattgatgggttttctgtgttctttggtcccctctgatgacaggatagtgaaatgagccctagctccgagtacccacaaactttgtaaccatggataaagtcagccacttacttatctctgaaattaaacttcccgattttaaaaatggatgtgatgcttcctgcgcctattcacagtactgtgatacactgtgatttgggatgtgaacacgctttaaaaataatggcccggttacatattctcctttttattttttatttttttttaatttctttttgaaacagaatctcactctgtcacccaggctgaagtgcagtggtgggatcatggctcactgcagcattgacctcctgggctcaggtggtccttccccctcagcctcccaggtagccgggactacaggcacatgccaccatgccgagctaatttttgtattttcatagagatggagtttcaccatgttgcccaaactggactccaacttctgaggtcaagtgatcctcctgcctcagcctccgtaagttgggggattacaggcgtgaaccaccgtgcccagcctacatacgctcctttaacacaggcttttggttctttgaaattaccaacattcaggattcttaatggcatcagagaatataaagcttgaaactatctagaatttttttaaggaataattttctaatcttggttctctgcttctgagtatattttatttgggcattttatttttctccaagatgagatccattttcgctcatccattttgaaattgtttttctctctgttaataaaacctttggaatggtgccttgatcaggctaactccagattaaatgtttctctttgaaagattgcctggtgatcagagttgtttttcattctcttttcttcttttagccttgcctccccgattgaaagagatgaaaagccaggaatcggctgcaggttccaaactagtccttcggtgtgaaaccagttctgaatactcctctctcagattcaagtggttcaagaatgggaatgaattgaatcgaaaaaacaaaccacaaaatatcaagatacaaaaaaagccagggtaagtataatgcataaaatagtagagactgcccccagcaataagataacatataaatgttatttagaccctaataagtgaatttactatcagaaacataatagataataagtgaaaagctgtttcattatataatgacaaaaaatcatgttatcacataggcaagaattcttgtggttcttacatcttattgatgaaggaaataaaggatggctggagaaagaactgtaggaagtaagaagagatggaagggaagaaggaagagagcattagtggtagatgctgtcatagtaatagatcctaaaattcaatttcttggccgggatggtggctcacaactgtaatcccagctctttgggaggccgaggagggcagatcacctgaagtcaggagttcgagaccagcctggccaacatggtgaaaccctgtctctactaaaaacacaaaaagtagctgggagtggtgggcgcctgtaatcccagctacttggaggctgagtcaggagaatcacttgaacccgggaggtggaggttgcagtaagccaagagcacgccaccgcactccagcctgggcaacagagcgagactccatctcaaaaaaaaaaaaaatgcaatttctttaaaataagacaaatgcatatgataatttagagtaccagtgccttacacagttaaaatcacaacttcattgtaaagctcagtgaatacttagatttatggaaagaattggaatgtaaccagttgaattcagactattttttaacaaggggttaatgatataattttatctaataagaatttttaactgacactgctgataaagcacatcatcattctagcagattttaaaattaggtaatcttaggtagcaagaattttacatgttcctaccctccccgaggaggtccatatttgacagggcttcatgtgattcctgtaacatcttggtggatgcattctgtatctactctaaaatgatactctgttatcatccctacactcttcattcttatttacttccttacttaagaatcatttcttctaatatcaaactacattttgaaatcagagaagagataagtggattagatttttgcttctaaagagtcctttaatcaacgtgacatgtataatagtggttccaaactcaaagatgatattttctgcactcacatctcacagggttccagtgaacccccaagtatggtaacagaagcaacagaacaatctcctatactttgattttataggacattaaccagaaagttgttacacattcatgagcaaagtgattacaatgagaattaaatttaatcttatcaaagattttgctctgatgactgtattttcttttctagtttctgtggttttattagctacatactttattaactacacgttgactctagttattgatcatgtcagatagatctatagctttggaagtataataaagtgtaaaagaaagggttgtatcactttctgcagcaggtggtacttcaaagatacaaaatataatactgtaaagagacatggcatttttatacctaatattactaattttttttacattattccaatatgtagcagttcagcagcacatggcaactatcttattttgcagattaggaaattgagggtcaaaaaagtgttctgctttgcctcaagtcatataactagtaagagactcagtgagagctgagtttatcattgttatacccattaaaaatgtaatatactgagaatgaaattaagtttcttcctgtagatcatagtggtaattaatggttcaagttagatttgaaataggtctgactctaagtctcatgtttaacagcatatgtgcatgaggggaggaggaaatacaatgaatgaattgaaaagataagtatgattcttacaaagaagtttaacaggacaaaaaaatactcctagattttggatggaatggattttggtgtttgcttttcatcagacaagttagtaaggaatgaagttatctctacatgcagggtaatgtctcatttatttctacgtggctgtcaaaggataccagtaatatttaagtgcccatgaaaggttttatgctaggactgtggagaaattaaagaggtatagggcattacaatctctgtgcccaggggcgggggtcataagattgtacagagattatctagttcagtcttatatgaaacatgggaaattttggaagttatgtattgaaacactgttagagcaggggaggaggaagggagggaggagaatttcatctagaagaaagcatctcacattgcagatattcaatctgatgctacctggagagaagcaaatgaagttcggtagataagatgagaaaatgaatttttttaaaaaagtgaactgactagaatgaataggctttagaaaaggtacatgtatacttaaagaggtaatttgttacctggcttcaatgacatataaaagtatcattagtattcagaaaagcattttcatattggcttcataggtccagacagctaagagcactgtctacatattaataaaatcccattataccagaaagggcaatagttagaaattacttcttttaaacaatagtcttgctggaaagaattaaatggggaaaaatgtattgaagtgatgcaaccataaatcactcgcagcaaagcagttaacatatttgatctaaaaataagacatactttgtatagagtggacagctacttgagaagcgatcatcttatcagtttttagaattgggtattttgtcatttctaaaattgtgtctttttataaagaagagcattgtcagcttttttaagattaaaggttccaactgaatctcaatttaattaacatttgcaaggtgttctattatttcaatttatccagtaaatataagtagaaggaatataattattgttatacccatttaaaacattaatatcctgaaaatgaaggaagctgagtttcttcctgtagatcatagtggtaatgaattgttaaacttagatttgaaataggtctgactctaagtcttgtgttttttcaacagacatttgtgattatgctacataaagttagaagtcagaacatagggctctggcatgcttaggataatgtctttaattaaaagattcttatttttcagatgcatttatatattactattaatgatttttaattactaagatattcagactattagtgttttgcagttgttagttggttacttgacttaaactttttcttaggctatgatcaaccaagcagaggtgaagtttagtttgaggtgtaagatttttctgggattctctttaattaaatactttgactctttcccaatccttagtcttggcttctttttcacacttcttataatcagattatgcatagcagccaacatatccttttaatctcttggtgtttagtggcacaatttcacagcaatatgcaatttctattattttgtaaaatcttacccttgttttgcccacggtcctactaaaaactacattcctacgtgttctttgtatgatttttgaattcccattgagcctttgtttatttggctaacccatgtgtggggccaatgaaaagaaatggaaactaccctcatgttatatgtctgcttatgtctttgttcttgttttctttgattggtggatgattttgatcaagaaaactggttaaaaagcttggcgtgtgacagattcatatgtaaggactggcagattgacctcatttaaatacctgttctatcttagctttattaaagactggcttcctattatttgtatgtttcacacacttttggacaccattaattttgcctcagctcttacatattttaattttgtttaaaattggctgtcattggttacattggacaaatattacaattatttcctctatttttactggttgctttttttgactttataatggaaaaagtttatgtgcatttcttttctcatattagctgagcaactctggcagatcacttgaactttatatataatgaaatctcaatgttcttatgtagaaaatgagaatcctcagtggcattccatatggtttatgtgaggcacttggtacagtgactggttctgttgcttaagaagcctctcttttagccaagcacagtggtgtgtacctgcagtccctgctactgaggatctcttgagcgcaggagttcaagaccagcctgggaaacatagcaagaccccgtctctatacttaaaaaaaaatcataatttcctctttcacttctttgtccttttcacgatgatcagttttacactatctgaagcagtgttggacacacacacacacacacacacacacacaaacactgtctatataattccttaggggtcagggaaccaaaactgtataaacagaagagttcttccctatatgtgtttaagttgccttagcctgtaactatggtagaataatcgagttaaaataaaactaaactaaataatagctaatggaaccttgaattcaccttgtaagtgagcacacagtaaaaaacacagtgtgctttctgatattaaaaaaatgaaaaggaaattaatattcagaactttttatcttcaaatcacttcacattaatttatttttacactgtactgttttttcttattctaaaagtaatgcatgcttattatgaaaatccaaatatttcaggaatatagaatgtaattactataataatagctaacacttattgggaagttactatattgaaaaaattattttaaacactttacacgaattaactcatttaatatttttagaaaataaaaatccattgaaacaccaaccttcctccagatccctagaaaactcatcaattaaagagcaaaaagttaaatttatgactataagggaatcaagtagtctttccaagctaatttccttcttatagacagagtatggtatcttacagaaaagaaaaaaagaagactgttgtatccatacttatcaaagccccaaatctttttgcaatatataattttcaaggaagatttggctcattctacactcttactacattctgtccttactctaggacacaaggctggatgaatcccatagttaaatgtatcattagaattcagagggatgtttatgctccttgaggtcagtggttttccaatgatgtctctgtagagtcctaaatttctattgaattgcaaaaaggattaccagtcactctgacctggaacactttctgtgtgatatttttgaatatgaggttctgatttaagctttcattttaaaacaggattttgttgtaaaaaatagttgaaaccactgatctaatttaatctttctctgcacagagatattcttgtaggaatgtgcttggcaggtggctatccagacttgaatctttccaaagagaaaacctaactctttcacaagacaccctatacatttttgaatgctcagaaaagtgcttctatgtaatatcattcaaaacatgtttcctttttcctgtaagacttagttttcctgtaagacttagcaatcccaaataatttccttttccatatgcatcctggaaatatatttaaatagctactcatatttcattcatagttgtctgccagtgggacctctgtttctttaacataatcctctctagtgataagatttctaggccctattcaattctgatcaccctcttctaaagtcctttaattatgtttttttatcatcaaatatcattccaaagtatatccaaagtataattcagcattctagatatgatctagccgatgaggaatgtattggggcttttatccaagttgattgatgctctgctttaatattaatttggctaaagagtacataaggttttttttgttattctttcttcttaaaaatagttttaaaaatgggttaataataagcatgtggctaattagaaatccttatttctgcatatattgtagtcaagggatatctcctcttgtatttatgtcaccagttttcgtacgtgaatgtacttgtgatgcttatctcgatcaaattgaatcttagtcttggcccattgatgttctgtcttaggattcccaagggtgttctccatagaaaagattccatggccacatgtcatggctgccttagaaattcacagtacagatttgcaaaaattcactgagatgcattgttgtaaagagacctatttaactttttttaatgcaacatttattttagcatagaaccattttttttaaatctctctttcttttaaagcctaacatttgattgcattactaggaatagtattccaggaaacagtgccaaggcctattaggagaagtttgattttaagacttatccctttaagattatgttaactgtaaatatgattaccatgttttcttatagttccatctagttcaatagttaaaatgttaattgcattgggtcaagaaaggggtctttacatacaaacacgattgttcctagatttgtataaataggaaagaaaggttgttcttgagggtgttgtaataatcttggagttgtaaattcttgggatgttgttgtaatcttatctcagaatttggggacttaagaaaagctacagttttcttactttagaaatttactccttctgtggcattgaaaatcaagatactatgccccaccctgatattgttcataatttatctattattgctagtggtttcatggttatacatgaaaattcttccagcaaaccatgctaaatgttgggctggaaaatcttacagtgcttatccatttttttcctcactatttttcaaaggtacctgtcatgaaggaaacttgtcatatatgatcaaagtagatatatagctgataatccatttaaaaaatcatacggtatttgaacgctccaaaattcagccccaaaattaatacagcctgcattgggtgatattctaatattgttttatttcgataattttaaaagttgtcatattttattgttaagacatatctatttgcaaagatacttgtcatcaaaaggcccattttggcttatagggatatacttcagggaagctttcctatgaataatgtctctggttgatgtgtgaatattctttaaatggcccttggtggtctccccattcctagatagataaggctgttaaattacatccactttttgtcaactttgttccgtggaccattattttcagaaaacattaacagatatgccttgtgaatgaaaaggattccatggtcaaaggagtttgagagaaaataaataatatatcccttttcggggagtcagagtacaacagcatattcaagatgctgagaaatcctgtgagattaaagataatgaaaagcctgtctttatttcacctaatattttccaaatttatttgaatgtggaacacattgctttgttacctcatgtttacctggttgacatcsaktcccgactagcgcagttaacttttctttttctttttctttgaccaagtctcactctgtcacccaggctggagtgcaatggtgtggtctcggctcactgcaacctctgcctcccggattcaaatgattctcccgccttagtctcctgagcagctgagactacaggctcatgccacacacctggctaatttttgtatttttagtagcgacagggtttcactattttggccaggcttgtcttgaactcctgacctcgtgatctgtcttcctcggcctcccaaagtgctgggattacaggcgtgagccactgctcccagccgtgaagttaacttttcaacccctatgttggtttgaccaccactgcccctggtctggaccacctctgatggtctttgccctctcattatggcatttttctttcctcccaaccagccttagaaatattaggttctgctgagtacttaagcaaacatccagatattttattcattcattcacacatttattcaataatgtctgaagagaaagcatagcctgatgtatgctccacgagactagcaagaagttgacattatagctacactctccaaagtatatgtcctaggtcaagagatgagacatactgaaggaactctcatgagaggcgtactcagggctgtcagaatttagacacgtgagagcagctccagctacatgaccaggaggggcttggtgaagcagttggcacctgacatggccctggaaggtcagctgagattttgatgcataggaatgcaggacccccattgtaggaagaaaaaatgacacagacaaaagcacagaggtggaagatcagggggtctacatgtggaactttgggtggttcaatcggatagactggaggatactagtaggaattatatttggaacaattgatttttctcagttaacattaatgtgtgacaagaagaccagaaaattcaccagaaaactagcaaagtataacgtgggagatttgcaaccagaaggattactgttgtttcttcctcctttgttttctcccttgtcgttatccccttaagagcccaataaatcacagttaccaggctagagcatagaaggattgctattattttttggagataggggtctcaccctgctgcccagactggagtgcagtgactcttcaccagcatgatcatggcacactacagccttgaattcttgggcccaagtgattctctcatgtcagcctcccaagtagctgggattccaggggcatgccaccacaccaggctttagaataattctttagaaagaattcagtaaactctgagccaatccctgctgttctgagttcttatatcttggagactgcttaaattataggttatgtgcaacagtaaaacacagacacagcaaatcacaatgctgcccatgttaaaaaaaaaaagtgaatgttgatgtaatattcagagttttataaaactatgtgataatgttgcccaaatatttattccagtattaagaacctttcatgtggtactatgctcccagcaatgagaatcttaaggaaagaaaaattcccttccttttggaattgataaatcctcttaattcaaaattaacattattcttgatgttactctactgagaagaagagtgcacagtatttttaaaatctattctaaccttcagtaagtgtccttaacagacttgtaggaaatgattttatacatttttctcttcctaaaccctagtggctgatggcatttggatatagaaaagtaagaaaatttaccaattgggtttaaaaatctaaagtataacacagttattggtgatggtaagggagtaaaaagaaaaactacagaagaattcctttaaactactgatttaggtgataaaattgagatgaaatccatggtacaacttaaatgtgatgcatcttacttttactctaggtaaaatcatgaggtcagatcaatgtaacggaagttgtattttaacatatgtataaggtggggagaggcagtttgagaactctgaaagcatagaaaagtatgtatttatatttgttggatttctgtgatatatactgacaccactttggtcctgatcttataggaagtcagaacttcgcattaacaaagcatcactggctgattctggagagtatatgtgcaaagtgatcagcaaattaggaaatgacagtgcctctgccaatatcaccatcgtggaatcaaacggtaagagatacctacggtattctgttcctcaatctgtaacaagagtaatcaaaacatgtggtaagactcataatagactggtgtgttaaatctcattgtgaacaaattaaaaacagagaaagaaaaccagatgtttcaaggatcttgtatgtctttcataaatttctgtactctatgagattatatagacctgaaatatacatatattttttacaaaaggattttaataaggccatgaatggcagagataggttgggttgctaaaatataggggctatactatttttttaagttggtcagtgagggcagtcaagtctttggctctctgaacaacagaatacagtcatatatatatacaggatatatatacacaatatgtatatatgcacacagaatatatgcatattatgtattatatatgcgttatatatgtatatatgtttacgtatatataacatatgtattatatatgtattatgtatgtattatatatgtattatatatattacatatataatatgcatacatatataatatgcatatattctgtgtgtgtgcagaatacagtcctgactcaattctggcaattttattcccattacatctggcattaggtagtagaaagttaaaccattaattttttttaggcctattaattttgaaattaggaccgtcttagaggcaataaatttcctactaggaagaggcttcatcttcagctttgttcagaatagtaccaggcaatacttgttaaacaaatgaatgacttagaggtaagaaatacaatccacctctgacaacttctgtgttattccaggaaattaaaagaaccaccccgatggctttgtgttttgtaatagcctgatactccatgatttgatggaatcatctataggagctgatgatgatgatgacctagcaatgcttctttaaaccttttagaataatcaaatgctattttaaaacctttagtgcttatttatttatttattgaattatggcacttaactattgcctttacaaaatttgtcatctgttatataaccaagcctaattgcatcttcttggtaggagatgagaaagattctgcatttcaaaggcaagcgctcttaaagtgataaggtaaaaatgccaggtcagcacaggcagagttaaagtaattttaagggttaattctatgggaggctgatgtagtttttgtcacttgattcttctgtaacatactaagaaagtgagaagggagataaaaatcagaaacagggctgggaaaattcaggttaatgcctcatcctctctggacttctcaaggatctgctccatcacagagtaatcaaagtttatcactttcattttaaatgtctccctccatagagagtaaaggagagcagggaaaaggagtttccattaccattaggagtcctgtttattacagtttaaaatgtaaaagccatttaaaatttatatgagtaaatatagcatcactttattttttaaccagggcaggttaagcaataatagtttgctagtattactttaccccacgtagaattctataggatgctacctgaaacacacattaaaaaattaattttaatgggctgttttttactttctactataaccattgtttgaagctcgttctccttagtttgtcactggcttggttcagtgtgtttcctcatagttaatggtattcaattgtgatttttgacacttggatttgattcgtgtagctataccacaaagtcccaggaaaataaaattaaagctagtgtcatagtctcactgagtgtctacagaagtatcatattgattattccatggtttctgatttacaggattaagcaatgaattatttactactatattattcctggcaaaaacccatagaattccttttttattaatttgggggtactgaaagtttgataatatggctttttacatttcttacataggaaaaacagctaattcattttttccacattaattcactgaagtcttggtctagtgatcaaatttgaatatgtagtgttgaccaattatagggtagagagatgaaactcgaggtgtttttgataatgagtcttttttacctggcaagaataaagagaagttcatggaatattttaagtaaatccttcttaaacaaccaacaaaaattctttcagaaataggttcctatggacttatgtaattaaagcctctgaagaatgagaatgaagagtctcaattgcaatgcaagttggccttctttttattctcttcttggaatgttaggaatagatcatccttatccaaccccttcattgtattaaaaaagaataaaagacagcatagaaaacagacttattcaggatcacagagatatttaacagcaaaaggagatatgaacccaggttttttttgttttttttttttttgtttttttttttttttgcttcattcctaccacagtgcagttccatctgtatctgaaatgttttttgtgtgtgttttcttttttgttttttgagacagggtttcactctgtcacccaggctagggtgcagaggtgtgatcttggctcactgcaacctctgactcctggactgaagggatcctcccacctcagccccctgagtagccaggtgcatgccattacgcctggctaattaaaaaaaaaaaattttgtttgagatggagtgttgctatgttgcccactctggaactcctaggttcaactatgttgcccactgtggaactcctgagttcaagaagtctacccaccttgaactcccaaagtgctgggattacaggtgtgagccgctgcgcccagccttactctgtatctgactatatgcttgcaaatgtttaagtgagattcttttgcttataaagaacagaagctgaaggaatggtatgaggcctaaggagtgagggattctatggcgaagaactagaacttcattataactcagcctcgaggagatggaattgtatgctgagcatctctgcgaatttaagcaatgcgagtttgtggcttttctctctggtgtttctacctttaatatgcttctgatagttttaacaaaagttacctaccttctcacctctcctactttcagactccgcctctttataattccaaactttgacctgtttcttgcccccacgtggccatattcttcatggcaatttcaggcattctttcagctttaacctctactgtatgattgtttccttggttccccagtgaaattccgcagaccaagaatcctattagcaaagttgattgttgcatattcattaaaagacctagagaacttacaaattatctgctgtctggtcatacgtccactgctgcctcaactagggagggtggagccggaaacatagctgcccggaagctcctctcttcaaagtctgggggtggagcatgcagctcacctgggcctgtggcttggcaggcaccatgattgacaaggccagtttcctgtacattagaggagataccctttttgctctgcaccttagagtcctagttatagtgcatccagaaggaaaatatgtaatcatcttgatcccttatcctcttccactgctatctaagaatttgctatattctgttcaatgcttggttgtcaaagaagcctcagttgggttctgagctctccggggcttagatgcactgcctttgtattgtctcattcctgtctccctaggaatcagggcagacgttgcacagaaacactttttctgagagaaaaagggcactttctactgggtttataaattgccgcaccactgaaccatgtcttcctaaatagatatttaccgttgacttgggctgatagagagtagaattctcaagaatttccttccctccctccttccttccttccttccttccttccttccttcctttccctccctccctccctctgtctgtctctctctctctttccttttttttttttttttttaaatggtgtttcgctgtgtcacctaggctggagtgcagtggcaggatctcggccactgcactggattcaagcaattctcctcctggattcaagcaattctcctgcctcagcctcttgagtagctgggattctagacaccccccaccacaccccagctaatttttgtatttcttgtagacaaggtttcgccatgttggccatgctggtctctaactcctgacctcaaatgatctgcccactttgggctcccaaagtgcttggattacaggtgtgaaccatcacacccggtcaagaatttattgtttcattgtggattctagaaaaaaaaaaagttgttaaaataagaacatgctgtcaaactattacattatgtagaactccccttgagattttaatttatattttctatgaactatcagtcactttattaatttcattttttcaccttttctatgtatttccaagaagctcatggctatagtttcgagaatttctatacaggtttccttgatgaatgatccttgtaggttgctgcaatctaattatcctaattttttcctatgcagaggattccttgtgattcacttaaattctcacacagttactttttgtatgttccaacatgtttagaacatattttgatacaagattctaagagagatggggaggttgggggagacattcgttggaagctgtttactttctccccagatgaccttgctgtttggcatgatgtttaatctcattaaggaagctatagtaattattaaaataaaattagatcataaaagtcttctgcaatgaaactcattgtttagatctatctggattagtgactaaatataaacgaaatgattaaaaaattaggaaattccccttgaaacagtatatgcttgggtgtaacagtggccatacttatactgttttcaagcacttagaaaataatacagtcaagcattttgccaacctacattttagaaatgtaggtgttttctgtcttttccaatgcctttcaacccctactttattcagaattagagaaagtaatttatcctgtagtagacatatatcaacctatgcaatctgctaattacttctgggacaatgtaaagcttacaaagaccagttgggttttcatataacaaaggatctcataggcagtaattatgtgataacttatgagtgaattcctttcatgaattcgtatatgacagcagaaaaggccacatacatcatgtttacacaccctacacactatatgttcatttgtatttgtggtttatttggctcagtctgtatataggaaaccttgacttagcaattaattcttagctaacaagctttgtgaaaactcctgggctttagagtagggaagagaataatagactttactggtttccaaattaattaagtaatgctttcttttaaaagattaatataggaaaatatacaactaatcaatcatatcttctcctaagttttcttttttaatcagaagaaaaattatttgaatgagattcaagttcccacaggagcaattgggcttgtagcaaaaaaatagctgtttcatttgagatgagcagaaaaatattatttttataaaatttaattaaattatcaattgcagcttttaaaaatagactcatactggtaataggcttcgccttaccccctttcccaaattgataatgatgttagaaatttcacaatattgggaaacaacctgcagttatgttgaaaagcatgtaaaatatgttttataatttgtataacagtctacatgtatattgtattatgtaggatgcccaggaaggcaaatacatgagaacaatatgaaagcaatagggtagatttgtcttttcaatgtatggtatccatcctgtctacactgtttattaatttcaaaatttctcagttgccttagagtaagcattcattatgaacaggaagaattcaggtacttaaagatgttccttaagttatctttataactgctaataaataaatatgtccacttttaaatcttttaaagaaatcacttgatcaaaatttttgtatgtacagcagtgacatataagtttggtaaaaaagtcacataagtgaatgttggaatacacacagacacattttatgtatgtttgtatatactgtatacaatgtgcatatgtgtattttgctacataattatatttagtgtattatgatcatgatgaaattgcaaacatgttacattcataataattagaaaaattcctttctagaagatatctttgagaccatgcaactttttcctgagaccagaccccgtttattaagaaagaattcaaacattacaaatatactaatgttcattatgtttacttgcctgttcagcataagttgctcagctgtgttcagtttctgataattctaaaacctcattaatttgcactaatgaaggggctgtcctttataaattaacaaatgtaatatgccaaattactatgggaaaatatgttgcttaaataaacatcataaagattgcaggatttaatgcttttttaaaagtctgtaagtgtaatataaaattactttcaatttacttttaacaaaaggctgttttccaaatctataaattctacccatagcacacataaaaatgcttgctgagtggttttaattaaaaagattaactttcttactagcaagattctttttacaatgaagactcctttggtgtagaagtataggttaacttttgagcttgtatttcctccagggttaattcagaaagtttgtatttgaaaccataatcattaaagatattttaaggtctccaagataaatacctgattttaggaagaggagttattttaagttgtctctgtgtagatgcctctttgtagtaacctcctgttctggtatttttaggtaacattcaattaaaaaatgaaacattatggttaaccttccctctaatctgaggtattttttgctggagatagaaaagttctgatttttttttcttcttggaaggtcacagtggacagctactttgtttgtcaaaaataaatttgaaaagagtcttgatatccgaattgggattgggacttctgcccagctctagttgagcaccttgggtttacgacttcatctggttgtaatgtcattgatgaatcctgaaggacaagagaaggaagcatctctcttagtgtaggtcctttgtttggaaacatggcccttctagatatttctagagaaggacacacactttgtatctctaatatagtttctttgagattacattttctcaaagaagaacaatttcattttctgcagcccaaatcaagaaagcttgttggtgctgcttcagaaacagatatcttcatattaccaattcggaatatcctctttctcgcctgatgcttgagaaaatcctgagaaaatgatgtaccctcacatactaattcctttcagtgagccccatttttagtggatgtaagagccaacgtaggcaactttgatgtattgaaaccaagcttactccttgcatagtttgccctcctaatctgtgattagagaggatcatccacacttaatttgcagcagaaagacacatttggtcttactaaaggtttattgctaatcacttgttcttaaacattgctgctgagtctcacatgactttgtttccctttcaattccacaaaatcttttgtccctagagaagcttcagagtttgaagaaatattggcgcttaaattgattctgcttacctgctagactagtccaatcttggaaaccctaaatggccatatctgtatttaaagatgattatattagtaataaagttttctactccattattaacagaatattaatttaaacataaaattatatatgacctgcttaggattctcggttagatctcataatttttgtacagtagatagtatcgcagtagattcagcttatcttttgtcctggttagaaaatgtgaactaccattaagtcatttggcaagacttatgacacagtgaaacttgaatgatatacatcattgcatctctacatctttccaggcttcataaaactgtacctttccaaaagtgttagattctgccaaactgaagcccttttcagaactgaatatggaattagacagtgtaactacccattccatcataaaggcagtaagaaaacaagttgaaagtttgaataagactgtcacaatcctcatgaaaatgatgtatccagaagtatacaggttggattcatccttcatttctttgggtgggagctgcatacttactgcctgggtagctaatgtctatcatatgataagcacctgtcttcattctcactggcaattttaaatagaattcaatgccagaacttgatgtttttcaccaatcctaattagaaacatggcttacttttatttttgaacaaaaatgtacttgttcaaagatctgtaacttaaaaattcttactacagcttggcaatccgatagctttgactttcttagttcccctatttcgacttttcttcctgagaagcctactgcctctttgacataaattcttcctcactgacccaagtggaggcagtgaatgcttcctaattattttagcacagctgattttatgctctttgcataagaaaggagaactatcaatttggactgtctttctgcatttctcactctctgtatggttaaagcctggacttttctcactcccttgcaatacttccttcctttacacttaacttttagttccaaggcaggctgtggtacctgctcccggcctcctgtttatatatcataatgtcctatcacctttttttttcagagatcatcactggtatgccagcctcaactgaaggagcatatgtgtcttcaggtaaggaaaataagcctggcaaattttactaaccagaatgacaaccataactgctggctgctccttctactaatcagaaccccttctgcatccagacctctcagctgctcttgttttctgcttcaatatttttctcaaccttgttctgtctttttggattttacttaagggaggatggttcttgctgtgtcttcaaacttaggcctgagaaacatacatgagtgaaagaaatctatatctaggtgcaacttaatgacattaagcaagtaaaggagatatatctgagttacaagctcagtttttatgtctttccaggtgattctcttagctgccttctactctttcacccctcagagtgtattcctgggtaatttgtcaacatctgatccgtgacctttgggtttctaataatcagttgtggatcgctaaacttaacaaaacaaaacagaacagaacagaacaaaacaaaacaaaaagacttacagcctttaaaaatgctgttgtctttgttttggttggtttctcacttgcctgtagtatttgctgatagcacttatagtctgagcagatattagcaacttagaacccaactctagcaatgcatatataaccataattcattgatttcttcacaagctatgaatttaatctatcctctatgtatttcattttttaaactttttcttattctttgtaatgctataattaatagagccttagaacatttaaaaattaatctttatttggaagaaaatttttgaagacccaagattggaaattcatctcagaggtacaatggtaatttggttttgcatggtgccttttcttttacaaaaattcttaaatttcatttgataatcacaataaacttgtgaaacaagacatcatttttcctcattttacagatgagaaaactgaagtattagaaatgttaagtcatatacctcaggaagtagaagagaaggtatttcaagttcgatattctttttattactccacatttaatattttagcttcattgagtttttcattatggctggtaccttgttgaaactatagaatgacctataatcaacatgtctttttccatcttacctccatcatttcctcttcccttcaaagccattttttaaaaccataaaagctaaacatctctgtatcctagactactttagctatatttaggacatattcatatgtcattactaagatataagtgtatgtgtgttgcggaatggtatgatcctggagtctaagaggttgttactcttctgaggaaaggaaggaaggaaaaaagaggaaaagagagagaaaaaaagaaaaaaaatcacatattctaaatttcttcacctttcatttacacgtttctgtaatatagggacttcgttatctgactccagtaaatgccattaggaaaaaaagagcttttacatttatatggaacttatcttgggaaattgactataactattatttcttaatatgtgacttgaatcttgataactttctggctgttgactttcaatccttctttgatactaagacttctttatttcttactaatgaaaacccatccgttccatgcttttttcggcatgagtcatatttttcattctctctgtacttaatgactgttttttcttcttttatctttgctacctgagaaaatcttgctactagatatccccaactattgtatgatttatttaattagcatggtttgtttgatcctaatgtaattattctattgctctagcagactttgcatggacttttcagcactttctggtccggatgtttatgcagatccaagttgcctggaaatactctcaatcttgtttgtttatttatttggcatgcatgaaaattggctttcactctcttggaatccaggggctattctctttggtttcatgttttctcaaaatcaagaccacatctgaaagaaggaattttctttctcacctgtggtgtgtatctcctcagagtagtctctcttggaagttcagataatgcttggtgtgtgggatattcttacagatggattgactccattttcatcccttttaaaagtctttgggtctagactatggtaatattcctttgtggtctttgagtattgcattctgacttataaatgcttcagcttctctgttgcacggtgttctactactcttttactaggcgatacccaagcctggcaaatttctaatttatgagtccaagcagcatgactcaataaagcctcattccacttttatgttttatagagtctcccattagaatatcagtatccacagaaggagcaaatacttcttcatgtaagtatacttaaatattctattcactggtttttaacccaaggcactatctgctttggaaggtcatgttcacgtctatcttctgcccctattaagggtcagagtattgagtttggcaataggtggtatttgctgtttggagtagaaatggcctcctaatatgcttaaggacaactagacatcctgtcctcccaatatacataagaatattaaaatacaccacaaatgtatcagttttagggtaatctggtggctttgaatattgaaaaataattgcacaagttctgaggcctaattcctggcaagcagtagagcacattgtgtgtcttttcagcttctctggatgccttcagcaactgcctgaggcatgatacccagctgtttggagcttccgttccaaaacttcttcattctcatataaagttagctgtgatggagtaagaaaactatatatagatgcccttaattcaaatttgatagcaagtaactgattatgaaaatgtttgaaagcaagcccctaggcaagatctcagattagttttcgtctatttaatgtgaaatgggctttgtgcttgtggacttctataactgttagattgattggggttttgtgctatgtcgggggaacttaaaatattagcaaggactagtataaagagtttttgatacttataaattgagaatatcatcgtattaaattttgatactcaacaggggagtttatcaaaccttgaaaattaaacttataactacagtctttctcttccttatgttagctccttatttaaagcatttctcaatttgataagctcttcaataaatagatgttcctagttattctatttcgatctggggagtgtgttgaaggaacaatttccttttgctatcagcagggtaggaaaactcatgaaaagaaagtctgtccttttggcaatttaagttgttttgtcaatctgtttaaataaatcctgtttgatgttacagcctttccctccaggttggtgatactagaactgtaactatatggtataaaattatcttttattgtgtgaagtatggtgttttggctatattttaactacataaagcgtcatttaactggattgatggcaatagcctggtgagatcaaacaggaaatgaaatgctagaaagggccaaattagtttcctatgtgttccaagggctctcatcatatcctccaaaatgataatttctgccggggaatttgtgctatttgttttttaattctacttataaaaagattagtataattatatggattttatgtagctagcatccaggaatcacattgagctttttttttttaagtgtttattctgcagaagcaaatactaggtttttcttttttggcattttgtctggaaataatttctctcctgtgtgattcattgaataaagttattgaaactcttgtaattggaacccttcatgctatcatcaatgggaccatagatactatccttaagcatatctgagcagtttgagaatgtaaaaaaatacttttggttttcccaagctttggggaactgaaataaatctctcagtttatgtttctattcattgcattatcactgagagagaaataattatgaaatctgactccattccctaattctcagtagaattagtttttgatatttggcaatggtttaaaactaagaaaggaagctttgtgtaccatgatattaaaatatttcaatgtgccattttcacacatcagtcacccggggtcatggtaagttctcagtaaatatggttgaattgattcatgaacacatttttttgtggaacttaattttattaggagaatataaacaatgaatataataaactagtaacacgatatattagaaggtgctacgtagtccaaaaatgagaaacagtagaggaggggaggggataaggagagttgaaacttgtgatttttattaggttgatcaaggtaagtctcattaaattgttgatatttggacaaaaagtggaaagaagtgaagggttaactttgcaaacatctagggaaactggctgggcatggtcgctcatgcctataatcctagcattttgggaggccaaggcgggaagattgcttgagcccaagagtttgaggccagtctgggtaacattagtcagacctcagctctacagaaaattgaaaacttagctggacttggtggcatgcacttgtagtcccaccttcttgggaggctgaggtgggaggatcacttgaactcaggaggttgaggctgcagtgagctgtgattgtgccactgcactccagcctgggtgacagagggagactctgtttcaagaaaaacaatcaaacaaacaaacaaaaaaacatctggggaaactgtatttaggcaaagaacaggctgtacaaaggcccttagacaaaagcatggctcatgtgccgtgtaggggaccataaggagccctgtggggttggagtagaaggaacaaagggatgaaatatagaagatgagggccacagaccctggggtctgagcatgtagtgccttgtaggccattgtcaggacattggtatttaatggaatcactctggctcctgtgtgaagaatggctcactgggaggaagggtagaatccaggatcccagttaggtggcttttgctgagagcatagtggcctggcccaggctggtagcagtagaggtggcaaaaaagtcagtctgtaatagtttgaaagtcaagccagcaagattccctaaccaattcattgtgaggtgttagagaaagagaaaagccataggtaaaaccaaggctgcttttgtttttggtttttaacttttggtgttccatttgattttcttctttggctttttcattatacttcttcatattaactattgttttacttgtttttttataattacaatatgcatgttttactaatcctagtgtgttttttaaaattttagattcagcgggtacattggcaggtttattacattttttaatctcatgaaaatatgctcttcagtttgaaaatataaaccagtcgtggcaggaaccaggtccagtcttagttacaataatgaaaatagcatgaagcacacagtccatttcaaggcagccacacgcaggacttgcattgcagggaacgactgtgaggtacaaatatctccatttagtaaaggctgaaggtgaaccttgaagagtcagcaataacaataagccaaactcaaaaatgccaaatatataaaaaagtcaaaggcctcagaaaagtttgcctggtcaaaaataatcagcttcaaagaatagatttcttttcactttattttagccagcaaggagatgctagtaaatccctgtatttgaaaagcgaactctgcttttctaatgtgattgtgcctgtaccggctacattctttgaactaatgacattggtgttttctaaagtaaatgttgaaaagcctctctgaagtagtatggattcagcaaacattttatgtattaaacagttctctgcgatttgggggtcagtgtaagacaggggaggctttcagagcaaacagatataggcagaggagatggatctgacttcacagcccccaaagttcccttttttcctctttaactcatgttggattagaagaaaaaaaaaaaaaaaaaaagagcaggcatggtggctcatgcctgtaatcctagcactttgagaggccaaagagggaggatagcttgacaccaggagttcgagactagtctgggcaacacattgagacctcatctctataaaaaaataaagaaattagccaggcttggtggcagccctgaagtctcagctacttgggaggctgaggtgggaggatcacctgagcccgggagtttgaggctgtcctaagttatggttgaaccactgcactccagcctgggcaacagagcgagaacttgtctctcttaaaataaaaacaaacaaaaaaagaaagaaagaaaaagaaaaaaacaaaaagaagaaaatagaagtcactcacctacccttctacctacttaatatattataagcatttttctcatgtttttaaatagtaatcagaaatatattttataggtcactgtaacaataaagaaatcattcttgactggaggtttttaagggattttttcatttacaaacacattatcggttttgccccctttctgtttatttttcctaccacttgtaaatattagtgaaatatcaaagttcttagtccttccctttgtaagacaatttttactactcaatttttggaaattggaaacttccattgttcattcactagtttagagttgttaattatatttttaagttctttatactaatctaataaagatcaaaattataattttctttattttcttttgttttttgtaaatgaggcatctgtgactaaaaacttataaataattgcctaaatgagttttctattacatgtaagtgacaagttttaggagaagaacttgaaccttacaaaacagtcaataggactatcttgctgctccttttatagaatcagcagaagtaaagtgattgtttggaacaagccttaatgacttcttctggagatgccagctgctggtagccccattttgcagacaattctgttgaataccataaaaaattgttataccaaccactttgctgaattaagcaccatccattccaatttaatacataaatgaggaaaacaaaacggaaaatctaacaaatagtaataggaaagaaaatcaagataaatcccgggaaaacagttgaagtggtaatatctgtttcaaatatgaataacagcaagcatttattgaaggcttactgtgtgccaggtgttgtgctagatgttttacatggatgatgactcatggttatcatgaaaacttattacactgtacgttgaaactgatacatgttgtccaaagtcacacagcagcatttaaccccagataatgcagtggactgctatgtcacataacgttttgctgcctcaaagaaaaagcccttactattgaaagaaatgggattctgtgagtggattgaaaggtagcctttggcaccaagtttattgggagtatatgtggtggattcaagtaaatgacttgtctggggccagttgtacccaagtgatcttcatgttacacgtcaaagcatggcaggtgaatgaaatgggaagagcacaaatgctgagtggactcatgctcttaagtctaaatactaatgctgaggacaatcgcggtggctcatgcttgtaatcctagcactttgggaggccatagtgggaggattgcttgagcaaattgatcatttgagcccaggagattgaggtttcagtaagtcatgatctcactactacactccagcctgggcaacagagaccctgtctcaaaaataataaaagaaataaattctggtgctgctaattaccgtataattttaaacaaattatgtgacttccctgagactcagtttcatctctcctctcctctcctcttcttttctgttctgttcttttcttttcttcttttgacagggtttctctctgtcacccaggctggagtgcagtagtgcactcatggctcactgcagccttgacctcctgggctcaagccatcttccttcctcagcctccctagtagctgggactacatgcgtgtgccaccacacctgagtaatgttttttagagacagggtttcgccatgttccccacactgctattgaactcctgggctcaagtgattcacccatctcagcctaccaaagcgttggaattgcaggcataagccaccatgcctggccccgagattcagtttctaggtctgaagaatgctatttattttaaacatatattgggaagtctaatgtgagaaaatgcatgtatatcatttagcacaactttgctttaagatggtcccttcatgtatggaagagagctagtgtgtggaaaagtgacatggctctaaaaagagaataaaagtcagagagtctctacatcttacttcaacaacgttggaaaatgcccttattgttggagaaggaaacgagtttatgattttagcctaagtgatgatgctgacagttctttgccaggaaatcactatgtcttttcaaaatattatatattctcagctaaggcttcattttacaggaactaatccaggaagtcttctatgaaatctctgaatgaaatgaacaattcagtttttaatttggcacctaaaaaagctagctgaaggaaaagaatgtctttgcagagacatttctgtcataatgagatagaatggtttcacttgggaatagcacactaatatgtattgattagattggaccagatctgggtggtccattggtggaatttagacccatggctcttacattctaccctcagttgtaactgacttacctgcttttatggtagaaaaaaacttctgggagcttagctaaatgattcttagctggaaaaatgccatttcaatttcagatgtttattggtcataacatgtgaacctctcctgccactgttggagagctacttttaattgaatgcaaattgtgttttcagatttctataaacatggcatttttcatgggttggtggctctgcccactgtggagaatgacaaacaaattatcatgcatcatatagcaataaaataataattcaaaaagaaaattgccctactcatattacctcatctttttggttggctggagagttacttacagatttttaggatactagagtgacttggtgcaagagttggggctcgtatattatagccattcataggtgcaagcaagttactgccttcacaatcagttcttttattctgtatatgaatatatcttctttttcttttttaaacaatactgcttgcgagtataatttatttcttcacttctgcctttgccctttctaaagtcattcactgtctatcattgcattccaccagtggaggagagaatctaaaaagttttgattaagctttgacctttcgtactggttgaaattaacgctttacagaattattcttttggaccataaaatatgtgtgtgcatgtgtgtgtatgtgtatgagatatagatatagatatagatatagatcattgatacttgcatcatactttacattttataaggcatattttcttattttgagtcatttatttatacaactcagtggcttagatttcatcccatggatgagggacttgacgttcagaaatctgtgacttgtcccaagtcaaagaacaaataggtagttctaaaaagaagagaaagtctactccttatctaaacagcacattttagggaagaatctgattggccctgattgcatcatgtctgaccctaaaatactgcatccagggagattaatgcctccagctgagtgggggctggggcacatatccactgctgtgtgtgttggggttagtgagggcagatgggctcagccccatgggaaccacatggtgtagaatcattacagagaggagagttctgtagcaaaagaagggaaaagtgagctagacaggaaaacaacaacacaatcattgacaactgataagcaaacaacyttagaaaaatcagaaaataggtattagtaacagaattttaaaggaaaattaaaaataggtgttgttgaaaattgtgtttcattgggcagacaaaactaagcaggatgagcaatctgaagaaaataataagctggaaaactgaatataattgcagtatcatttttttaaaagactcattagtacctatgagccattataattactcttaacagtgccctctttttaacccaggaaattctgcattttgaaagaaagtagaaaaacgtagacaaatgagttacagttttgaaattagaatgcatgggaagcattttgaaatctgtaaaatattctacctttgatgtcaaaagtcagagtacttgatatggatcctttaaaaaaaatccatgattgaggagattttgaaaaattcctagtttcttttaccagagtaattgtatgttgattagggtttgggtgttttttgttttcaatttggaaagaaaaagagcgtgcttagcccattccatataatattgtatagaaaactcaccaggtcttgttcaattgtgagataacactgattgaggttttatcagacttatagacatcaccatttaaacctaaacgaaataacaactccggtagttcatctgtgggcatcttccacttttctctgtcccactctgttataatgcacctcccatacaagctgtgaatacttaattcatttctttaataacttgctgtgtatacatagtttagctaatcatcaaaagtgttggaatgccacttttcattttatctcttagtctaccaaaggtcagcaaactctcaaaaaccaattaattgggtcactgtggcttatagcctagagctatgctcatctttattcaagtccataaccatctctgatttcaggtttggtgtttaggttgaatttatccatcaacgatgggctctttggtttgttctttgctgaggtattctagcactacctcttgagtgaataccaaactttaaagagctttttaagaaatgtcagaaggagagagcgagagagagaatgcctggctttgtgaaatgttgcagaaatttgtatttgtaattatcacaaatttaatcagtctttcctttaaatttttaaagcaattttggactattctcattatttcaatggtagggaaagtaacatatagatagggataggccaagtgacacttaaggtcaaatagcaagtgagtggtgaatgtaggtgaattaaaattggatggccctgtttttgctgtttgatccttagatcactgaaaactttccctctctttttttttttttcttttttcttttttttttttttcttgagacggagtctagctccgtcgtcaggctggagtgcagtggtgtgatctcggctcactgcaacctcggcctcccgggttcaagcgattcttttgcctcagcttcccaagtagctgggattacaggtgcgtgccaccacgcctggctaatttttgtattattagtagagatggggtttcaccatgttggccaggctggtcttgaactcctgacctcaagtgatctgcccaccttggcctcccaaagtgctgggattacaggtgttagccactgcgcttggccaaaactttccctctctttaatgaaaatgaatagataataaccaggtcctactatatttcagcatgaggctaggaaatgtgtatgcatatttcttgggaagtgggaggtgggaggtgtaatgattgggggagataaataggaaatagtccttgggctgaaggagttcgcagcaaagtaaaaagtttaattgtgattaattgtgcataatgacacgtaatcataatgggaagtaaaatatggcaagaggaagactttcaaattaagtttttttttttttttgtaatattccttaagatagaaaagccagccgggtgcggtggctcacacctgtaatcccagcactctgggaggcagaggcaggtggatcacaaggtcaggagatcgagaccatcctggctaacatggtgaaagcccatcgctactaaaaatacaaaaaattagctgggcatggtggcggttgcctgtagtcccagctactggggaggctgaggcaggagaatggcgtgaacctgggaggtggagtttgcagtgagccaaaatcgcgccactgccctccagcctgggcgacagagcaagactcatctcaaaaaagaaaaaaaaaaatagagaagccatttgtggttatgtaatttaaaagaaaattttggccaggtgtggtggctcatgcctgtaattccagcactttgggaggccaaggcgggcggatcacttgaagtcaggaatttgagaccagcctggccgacatggtgaaaccctgtctctactaaaaatacaaaaattagccaggcatggaggcacatgtctgtaatcccagccacttgggaggctgaggcaggagaattgcttgaacctgggagcggaggttgcagtgagctgagatcgcaccactgcactctggcctgggtgacagagcaacactctatctcaaaaaaataaaaataaaaaaggaaaagaaaatattattattattactatttttattattattattttactgttgtctgtctcctaaaatagcaaattgttgtttctacttcatatttataggtcattttactaagaaatcagaatcctgaaatttatctcattttaaaagatgatgacattctataatttaccgtcaagaataaaagattagtgatgattgaaggtgctggaaattaatttacactaaatagcattttgaaaatagtttggggaactttctgaaatataactagaaacttttagaaaaacatgactatagtatggtaagttgaatcattgttgatgagcagacacttatccttgatacagagatggatttgcaaaggctatgttacatatccgaggagatacttttgtttaggccatctggaaatgtgtgtatatgaaaaggttgcaattttatttttttaatagagaccaggtcttactatgttgcccagacaggtttcaaacttctgggctcaagtaatgctcccacctcagccccaaagtgctgggattatagacgtgagccaccatacccagcttgcaatttcctgaacttgttttattcattaagtaagactagttttgttttttaatttttattttttaaagacttgagttgatccaaagaagagagaagtggtaaattttaaaaaggatgcctagttataatcaaggaatccagtaaagtaaattaatctgttaaaattataaaacaaaaattttgcctgtatgatcattcctccctcaattttcttaaaattcatgtattaagagcagtgactaactgacaagaagcttctgtgccatttgataaagatttcaactacaaatgggaattaaggtatattaaaaaataaaattctgcatgacaaaatatttaaaatgttagtttttaatgttctacacaaatattgtcctacattttaacctagaaatctacgtattgaatcagcctataaaaatccatttctttcacaaataatgtagctttgagaacagatttttttcaataattctcagtctacaaagctatgaaaaggaagttgctgttgctgcattttttttaagctgtaaaatctaatatgccccagctctgatgaaatgtaccaggaggaacctgccttgtcaaacaggatatttttatgatgaaatgtgatacgaagaggcatagccttacatatatctgagagaaaattatttaagtggccataatagatttttcagaaattttgtacatttctcttatttgatccagatgcatttttttcctctgttgttctcataccagcttcttaatttcacctccctaatgttccacagcataaatacatctttgttcagagtttctccaagttatctgtgagaaaataaactatacaaagggtccctgggtatgttttaggatacatagattatgggggtgggagagttaccttgtgtgtgcaaatgagactgtatgtgaaacgaagataaggtttggagggaaatagatgattcaaagatacctaagaggtttattaagacctttaaaaatgattttacagtgcctgtaaagaggactgatatttaaactcattcagcttagtgaaaaaaatgaagaaaaatggaaagtaacatgcactacatgtgtacacacagaaacaagtataataaaactttctgccctttttttttttttttttgatatgaagtctcgctctgtcacccaggctggagtgcagtggcatgatctcggctcactgcaacctctgcctacccggttcaagcgattctcctgcctcagtctcctgagcagctgggattacaggtgtgcaccaccacacctggctaatattttgtatttttggtagacacagggttccaccatgttggccaggctggtctcaaactcctgacctcaagtgatccacccgccttggcctcccaaagggctggtattacaggcatgaaccaccacgcccagcccctgcttattttttaaggtttctagaacattggctgtgaacttttgggtaaatagtgcacataactcttctccttcctttttatttgaagtgcagacctgggtatattttattaaaataatggtctgaaattataaaaaatgttctttgtccaatcaaggagtaaaatcaaaccttgtattattttgtagttatactcagatgttagactatcttctagtccccagcagttcactctaggtggtcccatagctcttgcttgaaccacagtcttgccacttcttatccatagtgatgtgcacatcagttcccacaccagaatgtaaaatactagagggaagaattttggttgatttgtgtttctattcccataacttattactatgccagttcccagggagtatttattaaatggatgtcaatatcaacagtgagttaatgaatttttttgttggattatcattttttaagttgtacacatttacaatgaaaagaaaaccaccttcactttaaatcatgggcacagatatttaagtattttaaaatcaaagttttaaaaaactaacattggcttaaataatatttattagagaacttgtaacattttaagaagcattcacattctacctatgtatattttaaatttatttctgttttttacatctggaagatttttttcattttatcataaatacttgttttcatggtaatttataaaaatcagtttctcctttgataggattattacaaattatttcagaatctacttattaactggtcgctgttcctctctgtagtgctgaagaggcacttgcttgggaacaagagaagtgccgcaacagtgtcaataacatggatttttcatttattatctttaataataataatagatgacaataatatattttaataagcatctactatgtgtcagatgctttcttctgagaatggatattgttagtcccattatgtagatgtagagactgatactcaagacaattcaatatttgtcaagtagtggtagaagcaggatttaacctcagtctttctgactcttcatcctgtgttcttttcacccacagatggtagaggttgaaggctcagaagaacactttttgagctcagaaagctcttcttgtgacctctatgctactagtctaaagggcaaatgataattgcagctactttcagaaatggtcctttttccctaatgagatgaccaaatctgctttatgaacccagtttcctaagcaagatacagaaatagacacaccaatttagtatgataaaaggtgttaaaggtagaacaattttaggtaccaaattatatttatttgatacttggataatttaaaaataatgccacaaacttcatcccatctacctcccagtgcgcacacatttgggatgaagagataatgatgagaatgacattgtagataaaaggtatatgcattaaacatctgaaatgcttaggttattcaaagaaaagaataaacacaccatgtgatatgtagcctcagctacttcatgtttgaagttgatggtaacattcagatcagttttgagaagcagactgcaaccatagcttttagtttaagtttcagattgatatggaaggttatttgttttaacaatccctatgttaagttttcttttttctatgtttcaattgacttattttgtcagattttaggtttttttttttttttcaggcaagatggcattctcatccctgctgttgttaacatttaaagcatgcagcctcttgtgctgtggtgtaaattccaactgactgacgataattaaacagaaaatgaaacttgaatggcactatctcaaaatctacttaaagccacaacaggtatctgcctatagcaatatatcagttggaacacatgaagaataagaaattgtagcattttgtgtctgggtttatttttctttgaaatcaaagaagaaaaatactgatttttcctggatcactaaaacagtagtatggatttctaaacagggcagaccatacaaacacacaattaattatatctgaacttgaaatctcatactgtgcactttacctcttttataccagttgtaatttctcatttatgtacagatactgtagtaactttttttaaaaaaaagaatgtattattgtaattaaaaagcaaatactcaagaaagataagacacaaaggattaattgggattacaactcttctttctgtattgagtgcaaaagcttggtgatctcctgaattgtgcttcaacagtgacctcaaggctccttccaacccccaaggctctccttttttaacatttgttattacttagctattttatttggcagggatcccttctatctcatcttctaatgcactggcaatgatcctattgccaatagcttagagcctactgctgctggggtaagcgacacagccgaactttctagcctctgcatccttataaataatgcatctggtttcctgtaactacatgaactcttagactttagtaggcatttctttgttagtcagggtaaaagagttgggagatgaacagttgtggaaatagttataggcagttattatcactgattagaacctgagtccatgacatatgcattaatcactgggttaatgctaatggaatgcttatggtatttatagtagatataaataagatatagaaaaagaatatctttgctgaccaaactgcatgcttaattcaacatggaaagttctggtgaggttaatctaggacgctttgagactccgttgctcataattggacctgatttactactcatttaaaaaatctcttttaatttgcgcagaattcgctggctttttgggggtggacacacttgttcttaagaacaatagcaacaagatctttgtttaacataatatctaatgctccatgtaacttagtggtataacaaattattcaatttgtaatgaaaaaggtaaatgctgtgttaataagttaatagcaaagtaaataatgcatatttatacttttgacttcaaagtgtttataaacttatggcattaaaaagtaatgttttatttttgagcatcagagaaaatagtatttaaacaagagaaaccgatttttaaagtgaaaatcattttagcaacattttaaaataagccacgttaatataaaataagtgagttccatcgaagtatacactcttttcttcactagacgtgccttaattggacatgtcactggccaggcgtggtggctcacacctgtaatcccagcactttgggaggccaaggcgggcggatcacctgaggtcaggagttcgagaccagcctcaacatggagaaaccccgtctctactacaaatacaaaattagccgggcgtggtggtgcatgcctgtaatcccagctactcgggaggctgaggcaggagaattgcttgaacctgggaggcagaggttgcggtgagctgagatcacgccattgcactccagcctgggcaacaagagcaaaactccatctcaaaaaaaaaaaaaaaaaatggacatgtcacacagtgacaatgttcagtgttatgattctatcataaggataaaaaattcagattgatttagatgttgatgagaaacttgttgctctagagccttgtatattttcatcagaattaactgaaagaagggaaaattgtttctaatatgatacaggatgttcatcctgatcattttattattgatttctttagttaccatcagttcatctctgagcagctcattcatttagaaagatgatagcttgtaagtttaattctaaaactcattctcatccttgttagcatttgacatgccaatgattttgcagagctgggttgttatcaggactcatgtttagtcaaaatgtttaacacttatttctttgattcctgtagaatttccttattaattaacccagggtctataagcaacaaatttttaaatcagatatatatctatatgcatgtaattcatttttttctctttgatttttgactacttttttatgctgatattttagaatttctatgaaattaacacatttccttaacaattcaggaaatctgactaactgtactttaaaattgtgctttggtatcaccagtaaataagaaggcttcaattcatcaaaaagataataataaactgtattaatgctttcttttatttatttattttaatccatctaccaaaaacaatcaagacaacagctttaaaaaaatgcaatcattaaattactacgacagcctagtctgcttttgtggctgttttgttttgatggttaccgagaatggaaacagacagattatgtttttctgcttgtaattgtccagtacctccaaaggcctcttgcctgggcatgatcccttctggaattgaattctgcattcttcttctatcactaatcaaacaaaacactatcagaagaaaacatttccataactggatccggagtgaaggaaaatttcagatacttagacatgcatatacaataaacagtgtttcctgacaggctcattaaaaaagaatgactccactatgtgtcaactgcacaaatagaatccattataagactatggactcttacttctgaagtctgcctttgtgcccacctaagattaggaaaactaaatcttccactagaatttaaatatcacagaagcagaaacgattgcaatctctttccccagtgccttccttcctctttctctcagtcttgggtaggtcctggtacatatgaggcacttgcttaaaaaaataactgaaggaacgaatgaagttgcttaaggccgggagcagtagtctgtagatgagtcgactctcacctgtagtcccagtactttgggaggctgaggcaggaggatcgcttgaggccaggagttcgagactagcctgggcaacattgtgagatcccatctttacaaagaaattttaaaaattagccaggtgttgtgacatgtacctgtagtcccagccaattgggaggctgaaacagtaggatcacttgagcccaggagtttgaggctgagcaagatcttgtcttaaaaaaaaaaaaaaaaaaaggttgcataaagcagcagagacaggatcaacctagaatgtctgtggaaaaactttgaaaaagcatacattcttaaaaataaatgggaaatctgtggcagaggaaacagtaactactgacctgatcttcccttttcattttattttaatttctaatttgctgtaattgtatggtgctttcaaatactgattaaaactcttaaaaaaatgaaagagagaaatcacatttttctgctaaactgagtttgtggcatgccttcttccttcatcttgttgatgctcaaagaattatgcaacagagggccatcatactgtttagtatgttaaattattttgattcatgtacttactagcaacatcatttaaatggtttggtttcgtcatggccagacttaagacacatagcataattaagttgacaacctaatattccacattaaatcctggtgttggaaaaagctaaactgatcggagaaataaatctgtccaaagtagaaactgtaatatgtatgtgaacatgtatattctcatcatcactttttgttttcttcttttgttctctgttcctcctgttgagtcttgtgtaagtccaaataaaaattttattgtagagcccaacaacaaaaacaatgatctcttatgtaattgatgattttaaaaaatgctttgaaagtcttcttccatactttgtatcagtataaagatattgtacagtggtacagaaaaaaatggcttttgaagttcagatggtttgaatctttgcttcaccacttactagctatgtaattgtgggttatctgtgcatctttttaaattctcactttttccatctgtaaaataagaacaatatcagttactttgcatactgattgtaaagattataaataagaactgatgtatatatattacttggcacaatgtctgacctgtttctgtttttcacagtcaggcttctcttccattttctaaggtgactcggaccttaccactctaaaaattcaaatcatgccttcactttctgcagattgcacttgttactttagaagaaaaggaaaactataagatggaaattattttaatgtcctcttaccaaatctacaaaccccagcacaatgcctgtcacagatacggtcatttagtaaacatcttttggatggataggtggatgggtagctaagtaaattaacatacagattaggtctttggaaatggtagctatttttattacaccctgtacagtgaccttaaaatttgaaatctactgcttttgaaaagcaggtcatcctgaggttttccattttgtacctgccagattgtgaaaagaagttcatttcaatgctgcacagcacatttcctgatcagttggctgaattacagtcatgccatttcattttgagttggacaattcaagcatttagccctgatttttttttttgacagtaagttagttatttttatactcattcaacacatttttcccccaccacaggttattgtaaaaccacctgtctctgggagcacagttaattctgtgcatgagatttctaaaaatgttttacattgtcattgcagttttttaaaaatgtagagatccctctgctattcttttgcattgccaaatgcttaggtaccttggaaaactgcttaattggttcttcttatctcactagattctttggccttaggttgtgaatgggtaacaatcatttaacttttgatgtgccctgaagtttccatccaaaacttttttctttgaatcttttttagggtgaaagagaagaatatgggggatctaggtgtacattgatactttttagatgcctttgatgtcagtcagtaaacagcagtagacatttggaagagcatgatagaagagacagggctaattccaggtatttaaccccaagttaaggagacttaacctgaggctgggttatttctctgatctctagggacagagtagtggcaaagccttaaggtggtaaaatttttgagaaacacttctaaagacttatgttttgttttagaatcctatctaaaagcatttcaaacaaattaagttaagccgttcctttcttactggatgtgttcgggcgcagggggtgggggcaaaaagaagcatatggttgaagctctgcactgcagtaatttgtaaaagaagtacttttcctgctaggttaaattgctctgcctgcctcttgctgtcagggacatgatttagttaaatacggatgcttttagaggggctttgtactgcatcatacatatttaatagtttataaaatatctgtgtgaatcactgggtggagaatccagcagcagagaagctcaaccttcacattggagcctctggccttagggtccactgaccagttgaccactggaaaaggtgtgttcagaatgggagcgtcctgaataacccaaggattctactgatttcaacagaataagcttagcatctaacctttcagattttttcagtaatgtgaactttacattttctcaagtcacattattcatagatgttctaattccccagggatcgaagtatagcattaaggaaaatcccttctcaataaaaaaatggtattgggtgaggggagggggacagaaaaagctcttagatgttctatagcaattaatggttgccatataaagatacctcattgtcattagataatggttaaaattatatgaatcttttacccttgatataattttgaaattcatcttaaaaatcaattccttaaaataaaagtagtaggggaaagaggtagtgatgggtggaggctgggggatgatgcagagaaggaaaaaaataagcaagtggaggttactaaatgtagcattggtggattattttgtttgtttggcataggtaatgagttttataataaaacttactatagtatatcaagataggctcctttcatatatgaacccagaaacaccatgaaaaattttttaaaaagttccagcattttattatgaaattttcaaacatagagaaaaggtgaattaatcattcagtaaacaaacttatgcccactaccaagattttacagttaatattttcctatatttgcttactgagtgtctacccatttatctatcaactttttatttttgatgaaatttcctgtatatatgagttcattttacccccaaatatcccagcatgcatagtatatatattttattacattgtttaagagaacatgtaggtcatggattatgctatcaaatagaatatatgtttctctcaaataagccaccatatttggaccgagggttttctagtcatcatatttcagagtataactcagacagtagcagccttcttgttcctgttccctaataattactccttcccctgtcccaggcttttaattctccaaattaaaagaggatgtaacctcggcttcctgattcccagatactgataatttttggtacagtttgtgtttgagctactgcagtaatgttcgggcgattcccattttggtgacagtcttctttcctgaggatacattgccttcctatcctctgtagtttctttattctatactttcctatgtaagcaataaagctaattgtaatgctcccacaattcaggtagcgtctaatctccagcctgttctcaggggaagttgttgggttctggagcacacattttgtgtgctcccttagtttgacaaaatgctgtttaataacagagtccaaatatgaatattagtctctgaatatctttcagaaagaggcccattaagtagagttgtgaccacaagtggtcgtgggagcattaaagagtaaactttcaagtagaaatggtccagggaaacagtcaaagtgaggtattggtacagacatcattcatggctctaggcgagagaaagtctaaactatctaatcaagtgtgtgtatctgagttggcagtatgcaactaaaagctttcctttgtagaaattaattaaaaagaaggagaaatagatgtgattcccagtcctgactttgaaattaatttctgtgtgactctaagcaggttttttgtttgtttgtttttacctcccaataactttttttcttcttgtataaaataaaattcatgtaatgggtgcagcaaactaacatggcacatgtatacctgtgtaacaaacctgcacgttgtgcacatgtaccctagaacttaaagtataataaaaaaattaaataaataaaattcatgggtaaggcctgttgcagctccaacattcagtcaataaaaaaaatttaaatctaattattattgagattacagttgacctttgcattaaacctaaattcttttactccaaataactactgaaatagaaagaaaagacacaagtctattttcttttttctcccagtgtcttagagatatggtctccttctgttgcctaggctggtctcggactcctggcctcaggcaatcctcctgcctcatcctccctagtagttgggatcacgggcaggagcgaccatgttggacagaaaagaaacaagtcattcttaaacaaatctgactctagcaacctattgtataatttatggtagaaacatttgagctggaggtcaaatcataagatatttttatcttataactttcaaattcatatcgttttaagtaataaaaattgtaacaattttctgtaaacagaaaaggtttccaccccttgagctgaaaagcagcaggaaaaggagattggcatttcattttaaatgggatacgtctgcttccatgagcatcataaaggttatgaccttacggtagtgttgcctgacaggtggctcactaagaatgccaaatcagttctggaaactgcatatacttttatttcttcttttttttttgttccctttggtgcaactttgtattttcattttgatcagcaacaaggagaaaaaaaatgtgtgtactctaaggaaaacgtatattgtaagacattttctctggctaaggtcttttcaggtttagaaatgtgaactggccaggcgtggtggctcatgcctataatcctagcactttgggaggccgaggtgggcggatcacctgaggtcaggagttggagaccagcctggccaacatggagaaacctcatctgtactaaaaatacaaaaattagccaggtgtggtggtgcatgcctgtaatcccagctacctaggaagccaagacaggagaatcactggaacctgggaggtggaggctgcagtgaggtgagatcgcgccactgcactccagcctaagcgacagagcaagattccatttcaaaataaataaataaatataaaagagaaaagaaatttgaaccatgtttaaaagtagaatacttcaggtaatccctttcctcaagctttctttattctgggaatgttgtgcaagtatattttatacatgggcttatgtgaagtttcagtctcttgaatagctggtactctcttatgagtaattcataactgccttcacatgtgtataatctcatgctcaactgtttctctctattttaagcaggagatttaaaaatcaaattaacacatatttctagagcatttgctataagtgatatgctgtgctatatactgactaactacatttctgggttgattgggggaccagtttatagaattggctgacaagcaactgaactttaaaacaaatagctagtgcttaagtataagtcaagttcaatcactcccatttttaaaactttgctgaatttatattaaaccgacattggttattcaaggtatttcttccttgtttttagctaaaacttctcttactgcattaaactacatccattatcattttcattaaataagattgcacattggatatgtacataaaagcaaaattatatcttgcatttttgttacatttgccagaagaatgaaaaacaaacaacagaaaatttctctgagctgtgctgctctatgccctgaacgtaactgtaatagtgaatattaatgagacacagcaaagatatttgctcaaggtagctaagccaatatgtattgctccagtaaatgttagaaatgaccattcatccacataacctcagattagtctgcataaagataatgtttcttttgttttttcttctttttgtcacacacacacacacacacacacacacacgcacgcacacacaccacacagtaatttaacattatttgcatttactcacactggtaaaacacacgtctcaaagatgtttcccatagtttattcatccctcttctatgtcgttttcatttggatgcatttgcttaacaatgtctgctgtgtgccaggcatgctctaggtactggggatatagcagtggacgcagacacaagtgcatggtcttatggagctgacattctggtattgagtttatcacgtttgataagaaaacacagataatacaggaagactgccatttgcccctcatccttggcacttatttccagtggagtccttcatcccaaagatctcagacccgcacacacacacacacacacacacacacacacacacacacacagaaactagtaaatggatatgtcattgagactctgaattcaaaaggcttctgagaacatgagcaaaggcttatctttctatcccattttatatactaaaatattatttttctgttcaactccatcctatttccctatttaaaatatacatatcggcaggcgtggtggctcacgactgtaataccagcactttgggaggctgtggtgggaggattgttgaggccaggagtttgaggctatggtgagttatgattgcaccattgcattctagcctgggtatgaaagtgagaccctgcctctacaaaataataataataatagttcaaaaataagttagccaggcatggtggcatgcacctgtagtctcagctacttgagaggctaaggtgggaggattgcttgagcccaggatatcaaggctgcagtgactaggattgcaccactgcactccagcctgggagagagagtgaaaccccgtctctaaatatatacatatatatatataaatatatttttatatatgtaaattaatatcaagttcagagttcatagttaataattgcctgagattcactgccatattgcctattgatactttctagaagaaagggtagccgacacataacaaagtctcatttttccttgagttgaaattcacacagcaaaattaaccatttgaaagtcaacaactcagttgcatttattgcactgttgtgcaaccaccccttccatctagttccaaaacctctccagtggaattttaaaagaaggacaacttgtaaaatgaccaataaactgtgtttgtagaaaattaatgattttacttatggagagtgagaaattaataggttctcccaaagtaaagcaaactcactgtaactatcgtatgcaattaaaatatctttccatatgaaattctcacatcctcatctttgagatcatttactgtatcttcagttacagaggatctaaactcataaagaacaaaatgtaccagagtaaattgctcatcgtgttacagaatgagaacacagagcacagtcaatatcaagtacttgatacagcatctcacaaagtaatgcttaaaattaagtcaaattgtctgctctgagaacattttcactgggtaagaataatcagtcttgactcacctttaaagtgggcagaaaagacatgcccaggaaggtaaaatgagtttcattcatctcacctattttgcatcataaataatgtacaagaacatcacacagcacatggatttggtttgctctcagagaacttttctatttagctggggagagaggaatgacaagaaaaaatagttaaatattagcatattccaaattttccctccactgataggatctgtggtagttgagtttcgctagatcaggctaaattaattcaaggcatactttggaacaatcagagaaaatttgataaggaagtatctgaataggccattaaaagacttgaaaaaatggagaggaggagtatagagggtattttagatagttggctatgaataaagcctgctgatttattagagaccccataatctgtgtaatgcaatcccaatccaaagtaaaaccaaacaaaatgtatgtattgaatggacagcccagctctaagtttgggacaatcaaatactgatagtctttgccttcaaataaattgcattcttcagccctgtatacacgatgtaattaaatgatgacacatgactgtgaacatgtaccccaataaatggtacagttaagaaatgctgggtctatgatttggaaaaatgggaagggcttcgtcaaggagctgagacctagctgagggcatgttttttggataggtggaagaagctgacagatccattggtgtactttatcctccagagaagctgcaagttttgaaagtcaacttcaggacatggagctttcttgtgaaaattatgatttcataattcctcagcaaataaataaataattgccatttgtatgtagggatctctccaaatgaaacgactgctgccatcatttttattttatgttagataccatgaagtaaattctactcttttgccagccgtaaaatttaggagcaagaataaactttttcagtgataatatttttagattttggagataatatttttagagttatattgccaagatacaggaaaaaagtcaaagagaaaataagtgagtaataaggtcaaaagcaaaatgtcatttatcattctctttcatctgttggagctaccgtacattcttctgatgataaagtaaataaaagtaaagcagaatgactagcttgaattcatagcctagcttgaattgatgtagctgaggaattctagtattttttatttgatgatattacaggatgtttttcttcattgaagccagcttagaaggaagctgaaatattatgaaagtggatcagaaatacaaatatattttactttattctgccaaatcccattctatattaccgtgtctcttcttgatccaggttggcatactagcatttacttccttatcctctgtggcagattaattgtggctgcaaattctttgccactttctccctcaagatttatttcttctgtccttgagtctgggctggcacggtgactgcttaaccaataggatgcagtggaaatagtttgttctgctttcaggcacagacttttaagagaactggcagcttgtgttttcttcttcttggggtgctttctctcacaacctggccaccatgctgtgggaagctcaagccacaaggagaggccacaggttggtgcaccatttcacagtgccggctggcatctagcagcagctgccggtcgtcatgtgggggagccatcttgaacgtttccacctagttgcacctcacctgcagcaccagctgacgtcaaatgaagcggaagaaccactcagctgaacccagtaaacctacagaataaaatggcggttgttgtaagctatttccaggtggtttgtttcacagcaatacataactgaaatcgcttcccaaggaaagtcctggaatgagaccatggaagagctcatttgatttaaatgataaatagacagtatttaaatggcctatgcttaattcttataatttctaaaaattattaggcaaaattgtagaagtcttattttggaaactagatccttttaagtttgtttacaaattatattaaggtaataattcctatttcattgttacatattctggttctcatagtctctccttgaagtggtatgtaatcaataatataatcaaatgcacccttttgatgaaataacaaaagcagtatttttcagcagaaataggatgaatcagaacgtactcaaatcttggccacatagctatgtgtccatggcaaaattacctaagctgcctgggccaatgaaataaaaaaaaaatttaagataaatatggactgtatgggattagtgaagatcagaaataatgtatattatgaacctagcagagtgcctgtcacctgggtggaactcaacaaaggtagcttttattattgtgagggagatggtgataaaaggttaggtagtaaaaaattgtgtagtttatttttctaagaggacatggaaatggggtgttcctgggctttactggggtggagcttaaagggttaaaatgatatatccttgcagtttttcctacaaacatgcatgttttatccaaaggaaattctgacctctaaccccattcacactttcctttcttactcttttattgctatagaggatttgatgaaggcagaaaggcaacttctgggtcctagtcccaagggtagaactaatggagaattcttttattcttcacctcccatccttctccatttccccatttacattctttttccaatttggcggaaaaaaagcaatgttataggaagctggctgtctgcagattagtcttagcaccaaggtggaatgacttttgggggaaaaacagacacatcccaaagtctggctcatgtagtccaagggaaagagtacttgtggcagtccataggattctctctctgatgtgttgtcctagtctttgtataaaatgttggttttctctgtaagtgttgggtattttcagtgtaacagctagagcaatgcccagtaacttttttttttttttctgctgaatatgtttgctcttaatggttgaggtaaggtgaataattgctcttggtgtaagttaaagaccacttttctaaactatgggttatcatgcttggtattttctcctatctgcctgacttgaggccacctgaaccccattttggtctttgaaatttagctgaccttggccttggatgaaatgctggtgtattgagtataatagttttggtttaggtcaaaattggggaattcagtgccgtatatttcaactgggtgctttttgaagaaatcataaattaccctagtttagcataaacacctgctgatattgtttctgaatatttacatgaatattgatcattgagatcttactatctttcaatttgaatgctttaaatgcttcaatagatgttttctacaccgtgaaattgtatgtcctttgctagaatctttgtaagagaggtctcactgctttgaagtcaaataaacctagaaaataagcataggaattatttttaaacaccatttactgtgcagattatagagagatgaactcaaggataactcatgttgctcataaacttgtcatagtcatggttacatttatgcaaattggcacaggcttttgttgttgttagttatagtactgcaaacacagtttaagatgttaagaccctttaaatcatgtataattatggactaatttcatcttgaaggaagaagtgataatattcttatctcctgccgtttaaagctgaaacatacctcaaagtagtggagattgtgccctacaaaatataatgtgcttaaagcggattttctcaggacttgaattctaaattttactgcttcagggactcatatgatggctatgtagtatagatttagagagagttttacagactcctattgacataagtgaacaaaatggttccttggaaaccgtttagatgtccaatcacagtaagtgtggattacaggttcagatgcatattgtgtgcagtgatgtgcagcacagtgcttggggaagcctgtggtctgtattaagaacagtgcatttcttctagtgttttaatgactgttgttttaaaagaaaaaaacagtcagcattgaaactactgaaaggtaaagctcctgaaacctaacccaaaaggcatgctctcatagaaaactcttcttagtactttcagtgcggtgatagctgaggacatgtggtatatattacagtgccagggaatccaaacctctgcagtgtggagtcaccatgaaaggctaatctaaaaatgaagtggtagctttgctcgcatcataactctgttacttactggtgcttcctattagcttgacattattagtcttctttgggtgagatagaataaatggaaattcaaaggggaccacagcaggggatatatgggctgccaacccctcccctagcactcccttcctccagcctgtactcagcatttctccctgggcatgacaaacaaagtcttacatagtcattgcaaaaagggctaaaggcagagctgtccatggttaggaaaaaaatgttcaaactgttggttgaaaatcaggtaataacagtcctcttagtgaacaaaacttattagagggctagggaaggaatgctatctctcagcagcaggcaggaagaaattgctgttgaaaagcttacctctctagggaggaatcagatagcagacttcaagcctcaggtccaacccataaggtcccacctacaccaccccccaccccatccccatcccagctttgttagattgctagcatcgatcgctggctttctctgacccaacagtgggtgaaggaaagagactgaaagctggcaaggtgggggtggaagaagactgggacagcttttgtagagaaagaaagaaaaaggaggaaaacgggtgggggccatggggactaggcttaactgatgcctgcctgcctctctttgatttgatggcctttattccttctaattggataaaataggaagtcactggcagtcctgtgtggctggggatactgattttactcagaccagcctgcagctctagagtgtgggtagagagcggggagtgggggttgggagagggggaggaaagagagagaggagagaggacgggcttggatgaagaagggaaagaaagagaaagagactgaagcagagaagagccgcagaggaagaaagtgaatgagcactcaagaaggacaaagaggagtagtcgggggtggggtggaggcagggcggggaagggagtgaccgcccctcctggctgcactmttgcctccggagccctctgatcctgtttgcagtgatgctccgagggcaggcacctgctgctctgtaatgattcagcccctttcagccgtcgtcgcgttaacacaacaggatgctgttgctattgtcactactgcctctcctgccgccgctgctgctgccgccgccgccaccgccgctggtcctccttctgcttttacttctcctgcatgacagttgttttcttcatctgagcagacaccagcttcagatgctcgaggtgagaaacatgcctttcagtttgggctactggtttacttaattaatcagccggcagctccgtcgatctattttcgtccctgtcctcttgacgagcccgggatggtttggagtagcatttaaaagaactagaaaagtggcccagaaacagcagcttaaagaattattacgatatactttgattttgtagttgctaggagcttttcttccccccttgcatctttctgaactcttcttgattttaataatggccttggacttggacgatttatcgatttccccctgtaagatgctgtatcatttggttgggggggcctctgcgtggtaatggaccgtgagagcggccaggccttcttctggaggtgagccgatggagatttattccccagacatgtctgaggtcgccgccgagaggtcctccagcccctccactcagctgagtgcagacccatctcttgatgggcttccggcagcagaagacatgccagagccccagactgaagatgggagaacccctggactcgtgggcctggccgtgccctgctgtgcgtgcctagaagctgagcgcctgagaggttgcctcaactcagagaaaatctgcattgtccccatcctggcttgcctggtcagcctctgcctctgcatcgccggcctcaagtgggtatttgtggacaagatctttgaatatgactctcctactcaccttgaccctggggggttaggccaggaccctattatttctctggacgcaactgctgcctcagctgtgtgggtgtcgtctgaggcatacacttcacctgtctctagggctcaatctgaaagtgaggttcaagttacagtgcaaggtgacaaggctgttgtctcctttgaaccatcagcggcaccgacaccgaagaatcgtatttttgccttttctttcttgccgtccactgcgccatccttcccttcacccacccggaaccctgaggtgagaacgcccaagtcagcaactcagccacaaacaacagaaactaatctccaaactgctcctaaactttgtaagtagagagagagagagagacgatgatgatgatgaataaaaggggtgggtttgaggtccccaaaggacatttccctttcttcttgcattttagttgcctggttttgtttaagcaaagcctatgtttgagatgcttgggatggcattgaagggccgagtaaaatgatcttgcaaactccggatctgaaccagtgttgtaacagcagctctctctagccacatggctcaatctggtaccgggaatgaaaaacttcagcatctgcaagtcatgcttgaatttaagttaaattcaatttatttctaacacattttaaaattaaaacatcacgccatctcttatgttttatagaaatgtgactttcatataccagtgagtattatttkgtgtctttctcttccccatcatagatttcctgtcatctctctgttaccctctacctctcagcgaccccaagctgcctgtwgtctctctctccttcccgttccctaaccacttctccctacttttgtatcttaattggttctttgagattacagcaagtcttaagacatttacggtgctagcctctcactagcttgagacgactgctgtcctgcccagatggcactttcagttagtgagcacttactagtggcagctttattttgtccaggacacagtaggattctgcatgaaggattttcccaaattagttttgtcttctataatcaaatgtttaaatagcttccttggcagttgttaaaaagtacaagatccattagtgaggtacatctttttttttttttttttttttgatgtatgtcatcttagtctggcagattgcagcggcccagtttaataacctgtgatgtgcaragagcccacgctcttaaaaacaatacattcctgtttgcattgmgtaattgcaatagctttagagtggaaagttgacaggaatgaaagcatgactgttctaaatatcaatatagaagggaggagttttctgtagccttttaaaaatgtttctagtttatttttgttgtctctatctcctatcactttttaccatgaggaatatttacttagtagaaaagtacaagatcagaaaatttggttcttaataacttgcatgaaagctcttagggttaaaagagagttgacaatttctctgacgaaatgcctcttgtttttcctctggacagtaatgaagaataaagaataccttttccagacatcatgttcagtgtgaagtagtgcagcatgctgtaraaacacagaaaaacttgatttgtgcttgtaactcccgatcatttcacgaacaccagattcagtggcaaagatttaaagaaaaaaaaagtcttgttttctaggtgcaattagggaaaacctccttcatgcagacgctgctttgtatctttatcaaatccctgaagcatcattaaaggtctgacagacatcactgcctttgctgcctcttcccacctggcaaagtgactgggaaataatacccagatgaaatgacaggctataaaaagcaagtacagatcctgcaaaaagaagcgaaattcaccaggaggacaaggttacttgatcattttaaacttgtctttaattgaaatctgcttgaacaggtttcattgtccagagaaaraaaaaaatgccctttgaaaaacacttcaactaaattctataattttgtcatctgaggaaatcaggaaaacaaagaaacwtctaacacattttcctgatctaagaccatgtcagaaagtatgttgtgaagttttgataaattattttataaagtaaatttttctactaagtgttttagtagattacatattccttatcagtttttttttccccaagccagggcattgatattgtggcatctgcaataaatgggaaagatttactgctgcctaaaagcatcattgtggccagtttgaccagatgcacagctgcaacgttttgaagtgcatcggagataagcctagagaagcagtctgggaagtagttttctcctgaaaagttaggggtagacagttagttggttaagactttgaaacctataaggaaactctgttaattttttagactagttccttaaaaaaacatcaaatcttgtattgtaaaaattgtgagactactttttttgggggtggggagaggttgttgtggggagagtagtgtttgaaagggattggtccaggcagctttgtttttagagacttgtaagtggttgtttttgttgttgtttaaaaaggttgtaaccactaattaatggaaagcaaaaaaaaaaaaaaaaaaaaaaaaaagcttacaaagggattgtatttttcaactaaraaagtattgtttagtcacagaaagaactgggacgttccttttcccgtgcatgtttttgacataaactaagctgtcatggcttatatttgaaaatgacattatcatatgtgaaacatgctcttcagtggttttaggactttattctcccgtttccatttttttttctgtctcascatattcagcacattatgcacagagctgtagccttcaaggtcwtagactgttgaaggctaattgattcttctttatcctggagcctgagagagtagaagagagacaatcccagtaattgtgtctgcagcgttgctccccaaaccaatctaccwactaatgttagagttttattttataaatactagaattactccctcactgactcttgtcaaattacaacattctttgtctttgttataataaaaggcaaaatatgacattttaaattgccttaaggtatagtggctatgtcgaattttctaaaatgggtatttctttcataaagtaatatttcatattttcatgatattaatctatgcattcatgtaggtcttaagaagtccaatgcagaattggaatgaaagtatataagtatatatttttattctaaagtatttctaaatatggttaatggtttcccactaccacaatgattatattgtcatgatactaattaagtttttacttctcaatgagtcacataatacttgcactattcatttgttttgtctgggctttaaaatttttcctaccctgactgttgggagattgcaaacttagattatcataaaaagagctgattaattaaattatagccaggaaacagtggtaccatcttgaaagaaaatgttttctggatatgagatcctccctgcttgacaacagattcttggatgcaagaatgtgttggtattttcatcttgggcyaactttgttttgctttgtcctaagtcttattatgggattgtatgacaaaccattgttaccgcagtgacaataagaatcagtaaccatttgcaaaagatcaacatgatgagttggatataccataggatttctttccttctatttgaaagtgccgttcatttaaattctaatgcatccttcttctagttcttggtaactatgtttgtaggtatttcagaacagtgattttaaataacttctccccactttaatcatagccgattacagcctaaaatattaaaaactggaagagactgaaagatcttctattggaactgaataatttcataaatttaccaatgaagaaacccaggctcagaaatgcctattgaaattcttttattaaaatatactaaactctgaaaaatgtggcaaaatccaaagtattagaaaatgtctctgtctctgagaatttaaacacacacactctctctctctactgttttcttctatcatcgtatccttactgtagagagttggagctagagacgaatgtagcatcagactgagaattagggaagtactttaagtgggaccactgttcaggtgtgtgtttagtgcatatcactaaaattaaattttcttctcgccttcctgttttgctcttattaaattttcagtcgtggtggtcttttccctttttattagatcatccatactttgttcagcttgcttctgaaaacagcatgggttgcctagggtgagttcttccctcatatatagcagattgctctgtggctcacttcttttcttcataacccattttgttttctcctctctattcttttgtgatacccaactcagacttcttctcccctttccttcctaccttcccaattatgtatwgactcttttttatttttgtaattatgtcattttggctttataggtcagtatttcattgcatcatatcaaaataatttcaactrtctttaatgaaactttattgcattttaatgctgaatggcactttcatatattacaaacatacaaaaaaaatctctagccaatgaccaatataccagtttcttaatgacataattaaatcaaatttttaccttcttcttgatcttttcctcttttttttctttagtgtgcttgattccagtttttctgtttttggacatcagcatttctgtactcccagaaaacgatgttccaaaccatacatctgtgttcttcctccttccctcttccttttaacaactcttcatagtatccttttaaagtatgaaggaagaggtattttatagattgaaaaaccaaagcataaaaagttatgacttgtttagatgcccctgagaaccaggaatataacttgtccacagagtccattgaacgttctactacagcataaactacattccgtctacttttatgctcatgtttctacttttattacttttgctctacatcaatgctttgtttttcttctattatttcctctttggtttttttttgtttgtttgtttgtttgtttgtttttcattcagtgaaygtacgctaagtgcctactctgtgccagactctgttctagaccggttatatgacagtggaaaacagtagagtgcctgccctcagggagcttatgttctagtggattttaagaatctaattgcataatgcaatttgagatatttcttgctttcttatacatataccctcttcattcagcatttcttcttctttactgtcatgttattcaccttttgacttccactcctgtcttttcttaatatgttttcttctccatctaccaaatactgaacacttgcccagcaatgtcctttaactgacagcaatcccacctctgctaccaacaggctgagtagccaggggtgattcaccatatggcactatctaatcaaaccattggagtagtgagaaaaatttgatctgtctggccctttaggagcaccctcttaagatgaaaaatatatacataattcttctagcatgtacataaagattctaagattattttcagattctagagagttggtagctgtaaatatttttgtttctatattttgctcatatttttatgtattgttttggcttgcataacatcaagagtattaaaatattcccaagggtttttcatttcactgtacggacaaagactagaatctgccattaagttgtttagttcttaaactgaataaagacatgagttcatatactattcacatgaagagtgattgactagcagtgagtgaagttaatcctcatcatctcaaagctgattgtaatctttactgcagtgaattttatcgtgtgtatgcgtgtgtgtgtgtgtgtgtgtgtagacattcaaagggtgtttctgaataatataactagtatcttataatcatagaattttatatgctgaacatttttagagattatttgtgtcacttcctaagtgagaaaaggcaggtctggaaaagtgaagtgacttgcccagtgtcactacaaccaatcagtagcagtgctgagactaaaactgaagtcatccttacctttgctacacttgcttttcttctcaaaactgtttttagcatttattcaagtagcatatgttacgttatcataatttaaaagatttggttttcccatttattatttaaatactaattagtaaaacttttatcaccctatagcagatgtcttctttagagaagagaattttggccaggtgcggtggcttacgcctgtaatcccagcattttgggaggccaaggtgggaggatcacctgaggtcaggagttccagaccagcctggccaacatggtgaaaccctgtgtctactaaaaatacaaaaattagccaggggtgggggttcatgcctataatcccagctactcgggaggctgaggaaggagaatcgcttcaacctgggaggcggaggttgcagtgagccgagatcgtgccactgcattccagccagggtgacagagtcagactctgcctcaaaaaaaaaataattttacctttataatattgatatgtataagacacccctccggaggctggacatctgtctcccaacaatataatatatgagaaaatgttttaatgatcaacgttatcccaactgaaatgcgttacatacttagaaagaaattagttccttagtgcttaaagtattcaagcagtgacactgttgagggagatttatgttcctagcarattattaactatatttacttctgaagtctcttacaactctggttctctcagtttattgtctcagggtgttagctttccagtgggtaracttgactttcaatcctacttgtccctcttcatggccttgagcaagttagaccatcatgttaaatctgtttcctcatttaaatgtgataataataataatatacatgtcttgaggctgttaggagattaaatgaggttttggaaaactccaagtcctaggcctgagacataaaaaatatgaaaccagcaccaattttgtccctcattctattttaactccctgcctcactttgttctttttctcctytgatcttgacagtggtttggtaacaatgcctggagaatacattttggggttttaggggaaccttatgaaaaactttgaaggaagtgaagagttgatgatacatcatgctaaagtaggaattatgctagaaactcgagatcaaataccagctctacctcttgcatgctgtgtgactttgaggaaatcacttcacttgagatttagttttacatccaaacaaatggggatgttaacatctaaaactctcaagagattgtgataaggacaaaagtggttactgtacctaaagaaaacagagcttaaaaatatattgaattccttctttgccctttctatcagggttcgtgtatgcatatattcacaagtgctaacatttctagaaataaattgtaggggttctttaccagtgaattaatttgttatgccttaaaatggtctgtaggactttactaatttcttgagcccagtgtcataaaaggagtattttttcccttatacaaattggttagaatacatagattattacctttgagttacatagattattactttttgagtaatgtccaaaaatcactgcatgaggggcttcattatagggaaagcgataaggagttacttttgagagaggaaaagactgcatggtatgtaaaattgtgtttgtcaagtaagtactgtttttggaaagattgggacaacggaaaacaatctatacagtttagatgtggtgcaggggaagaacttggctagaaataccatgaatcctaagattatgttcaccttactctttttattgttccaaactgggatttcctgatctcaaaagatgggaattaacgtctatgagttgttttcagcatttgacaaaaaccatggaaataatatacatcaaataattttatatgagccaaatcaaatgtagaaattctttgagtatactacatctatgtgtatctatgtgtgtatacatacatacatataattcatacatataatattctaaataaaggggaaaattatttgacaataaaatgagcagataaaaatatttttaaatttggacaaacaggttgtttattaataggtttgggaggggtggacaaaaaaacttctagccctatgcctaactgctagagtaaaagagaaaaaaaagtgttttaaaagtaaaaaataattggagcttaagtatatattggagattctgttgcaagtaacttaaaatgaaatcttactagctggattattggccagaatcctacaaaaagggaagaagccagtgctgttctagatatacacacttaagggattttggtatttttgttgtataccttatggtttttctaacagacagatataagtttgtaagagcttgccatttacaaaaatgtatagtagtgggcataatatatgtatttttatttattctttaaagtagaactagaaatatgtgagatcctttgttcatcttgattgttattcactcaagtataatacctttgctgcagaaattgaactctaaatcaatactggagcaatgaggcagccccttcgaagcataaaatatttgataacaatctagagtatgttttgcctgggtataagttttctgactgtacaatggaaataagctgatggacccaataaaacttggtgaaataaaatggaaagcttcctcaggtaaaatattttaaatttttcatcagaaacatgataggacaagacttgatttactgtgattttcagtgataggcacttagtgtttgagttgcatttcatgaggtggttgtctcccarccaaaggagaaattcatgaactctctttgaagccagagttagcacagaatttaatatgcatgtaattatcaaatgtaaaaatcttcataatttattttagtttaaaagttattaatttaaaattaaaccaaatgtacatatatgcatatgcatttggaagaaagatgagagcaacactgaagacaatgatagttgccattaggaagaaacttaattcataggcaagcagaagaccctatatcttccagttcctaactgtgttgcctgtattggtgtacaatgtaatataattttgtttcccccgtttaccttccttttccctccctttgtttctttcatacttgccattcacagttactcttctctttcctctattctttcataccccacctattccttcttctccagcgatctcagggcacatggctccacacttctctctcccaccctgctctgaagccagtgtcctaaagcatcagaggttatagagtagatggcccagacctgtggtttctcactggatggttagtgggagagagtgaatgagaccttaaccacagtcttgaccatgattagcctgatgactttcagtgttgcctcttcctttgctaagtaacaggaagtaattgttttatgaaatatgttggtgtcacagcaataaaagctccatacataaatggaatgatctaaggatagtagaattgaactcttgttagcatttgtttgtaatcccttggtagagcttcctgggtcataattgcttgctcttctgggagcaaaaggaatcagtaaccattgattgttacatgatgctaagtactgcctacaaagcaaatcttaagaatgattagtggcagagttcagggttactactctgatctctttttactataatctttaaagcaagctgaatttcacagtttttcccatcaagcaactcctatgattcttcaaaaggaagagaaaaaataatgtcatgtaatctataaaagcttcagttgacatcaaaaacaaacaaaaatatgtaaaataattacttcagtttttttaaatcttcctacttccacgataacagggagacatctaaattaacccctgaccagtaactttagtcttgcatgaatatgatccttataatcttaattgatctgaactatggaacctgtggtacacagtcaataacctacatagccgctgcctatttagtaaactatacatgtaatcagtgggatcaatacaaggattctcaaaatccttgcaaaattcattcttcaagattgctgagttttctgaatagctgatgatttgtcaccttgaaacttttttatctattttggattgaaatcttttaataacttacaatactagtgactactgtcattttaaatgggatttattgaatataggatcttcacaatgttgaatactgtgatgtctttaggacatagttgggttatgttataactttgttgacccctgttatttcgttaggacatactgagttgtattagggattctagctcttttactaaataacccagacctacgtatgttctgattgtatkttgggttattacataatcaaaattagcattacagagctttaagccaccttagagacactttgaaccaaatctcttattttatcacagagagacaagcccaaagatgttaaccttcttgccagagaccacatagagccagaaaatgttgatattttcatctcttctaggctttcagctaccaggtcactttgcaaccagtgtatgttaattgaaacattttttctgcacttctgatgtatagttctggtctcctgcaggtttaaaaggcaaattttaatcaggttaaacatttgtattaaacatttatataaaggataaaatctctctgagtgagattctctccttgaggaaatgcatacattttggtgacatgttttggtgacatattttgcttatatgtcactcttgctctgttctggatcaacagagttcaaggatgagaggtgaatgacaaatgaagaggaagagtaactacttggttctgatggtccttggatttatagcgcagatttaggggagctgagtttaattcctagatgttttatttgttcacttgttcctcctttcataatatgtagaatggcagtaataaatcttttcttttcttttcttttttttttttttttgagacagagtcttgctctgttgcccaggctggagtacagtggcgtagccttggctcaccgcaacctccacctcctgggttaaaccattctcctgcctcattctcccgagtgctggggctacaggcatgcactatcatgcctggctaagtttttgttgttgtttttattagagacagggtttcaccatgttggccaggctggccttgaactcctgatctcaggtgatctgcccaccttggcctcccagtgtgctgggattatagccgtgacccaccgtggccagccagctataaatctttagaccttgatcatgcacctaattggaaattgttttttgaatgtatgagcactactaaattagtcagtgggcttcatgggatctgttttgaaatttattgtgaaaccttatgatttataaagcacaaattacttttattttcatttcttgaggacaccatagcaccaatatttacaaagcacgtatctcataaactctcttgtgatattgaagacacgcctgcagcagaaccccaaacttcctgtcttccctaactccagctgtctccccagtcttcatcccgatggaccatgttttagccaactagaactcgaccctgaatattattttttctcttccatgtttttgctcattctattttttctactataaatgtgctcttcaaacagtctctcctctcccaaattctacttaggcctcaagactcacctctccaaattagatgatgggacccctcttcttgaagacctcctccaaccccccataacctattgsttgtgctttatcacatttagatttgtgtgttcttatttggatgcttgcttattgctcatagtagactgaccatttcctaaggcccagagttatagctaactcatttttatgacctgtatagtaccaaacagtgtacaggttgagcatcccaaatatgaaaatttgaaatctgaaatgctccaaaaatccaaaactttttgagcatcaccatgatgttcaatggaaatgctcgttggaacattttagattttggattttcagtttggagatgctcagtggtaactataatgcaaacattccaaaatccaaaacamttctggccctaagccttttggataagggatactcaacctatattttatatgaagtaggtatctcattcgtatatttatggaataaaagttacactgagggtaacttgcttatgggagtggaagaggaagaaaataatctgaaaccgggtcttaaatcactgacattttaattttgaagaattcaatatagagtttagtcattacaaactttgttgagacatgcttttggacattttaacatataatttgcaaagtcggacgtgatttaaaaaattcacatcatggagtttaagagacttcaggcagcaaagaattttatttcatgatagtatggtgattaagagcacacactttggaaccagattgtctggctttaagtcccagccctgtctccggctgtgtgacagcatgcacactatgaactatctgtgccccgattttctcatctgtgaaatggtggcaataactatactttcctcaggggctttttgtgaggatcaaatgagttggtgttcataaagtgtttggaatagtctctggctcatagcgctatataagcatgagctgtcrttactaggcagttttaacaattaaagtgcatttccttagatttcaagtttgatagcttgtgattacaataacaggcttcaggaaagggccaggaattccaagggacctattgacacagctatggatgtgctactatttattttggtttggtttgttcatgtggtttttcctctgtgtgatttatgtgttaccatcatacctgcattgttctcaggatttaggagaacagaaaaggataatcatcaatctacctgtcagtcagaaatagagcgacatggatggtttgaataaaaaygctgccctctctggcaaaatgccatctgttgacattgacatggacaatcatatatgtgtatatctgaatttattgctgtaacttcttattctgtcataaaatggtggacaaattcacaaggagaaaagtaacttatcttagttgttgaagaactgttgcaaaggctttgaattctgcaatgctatcattttaccaagacagaaatctactcattatccagatgcactcaataaattaatgcgatgatgggtcctgtcattgataagataacagtgatttggaagtatctcagtgttattaaacaagatcacagaagagccattaacattttaaaaacagagagatcttgtagataacctaatcaaaatattttactttactcatggggaaactaagatccagaattgtgaaatgactgggtcttaaatacatgcagctagtaagaaacacgggctggtctaaaaaacaggaatgccacttcatttagggctttttttttttttcaatatcccatgctgcttcttataaattagataattctttaatggtggaagactttattttttctgttgttctatattctttattgagtgcctgctcaatagagaagagtttacctctaaaaggagaacaaacaaaagaataataaacmagaaatcatatactatcttagcaggcrtatggggaaaataagtgtgaggagatcagagtactggtggaggagcatagttattttaaatagattaaaaggtacaaacatacagtctgatagaagaaataacacctagtgtttgatagattagtagggtgaccatcgtttctaagagtctattgcatgtttcaaaacagttataagagaataatttgaatgtcctagcataaagaaaaaacaaatatttaagatgatgcatatcccagttatactgatttgatctttataaattatatggatgtattaaattatcacatgtacccccaaaagtgtgtacatctcttatgtatcaataagaaataaaatttcaaaaatacccttaagaaatacataaacagaatggtcaggaaaggcttctttgaaaaagtaacagctgatgaaaggcttgaatgaattaatggagttaaccatatggccatatggaagaatgttccagactctgggaaaaggccttactgcccaggcagaaggccagtgtagtcaacttaagccaatggcttaagtgtagcatgggaggcaggaggtattaaatgagatcagagaggtgatgaaggcytgatcagggaagcatgccattcattgtaagaatgatggcttttccaccgaaagagatgaggaattattgcagagttttgagtgaccatgggacttgatgccttaggttttaatgggatcactgcctgctgtgttgagaatagcttgtggagaaggatcccaagatcccggtggaaatagtcggaccactgaggagattgttgctgtaatccagatgtgtttgtaggagttgtaggagggaatgtaaagacattattggattattagattctgaatatattttgaagatagatttagaatgatgtaatgatgaattggatatgggatttgagtgagaggagtcaaggctgatttcagtctaagtagttgaaaggatacggttatcaccaactgagatggagatgatctaaagatcattttgctcagtctcccaatgcataggtgccaaataaatcaaggttcttatcaaaattagaactgtggacattaccttctcataaaaataaagcgagatatgcctgagagcctcctgtaaatcaatacrgctttatgtgtgactagagatccttataaatacaaaagaaaagttgcagtgaaattgaggatgtctgcctagactactcggtaacactatccagaacccacaacacgtgatgatggaatgaagtcccagggggatgtagaataggcttccaacaaaccactttattcctattttatggtttctttttaattcatcttgttcagcattcaaacctggttcaagttgttcagtttatctaaagcatattgccccatccctctcagctcactttcagtcatcttttaaactttatttcagaagtctactcatcttagaaatgtgcactttatccctaaggtgagctaagtactttcctctctttcctctaggctttgacagtatccagtattttccacccgtttcccatgtactctgctgacatgcatgtattcctcaaggtcaagcatttcttttatccatgwacagatgcttcacatagcaccatgtatactataagctctaagactttgaagtacttgcatgtcccaggtagaggtttttctcctttctctattaagctgtcaattttctatatttatgatgaaaatacacagcaaaagtagtgtaaatgcttattttacttctcaaattactcgtcaagttgccaaggtgccaactattttttgttccacatattatatcttctctacttcactttctggaaagtaaaaagcagcaaaaaggaggttatcaagagaggagaagcaggaaaagttctagacagtctacttcatttttctcatattctagtactctagacagggtgaaggctcctgttgcagaagtgatggtcacatattcctgcaaataccaagtactcagttcagcccgtgcctgcagtctcttwacatccctgtcctcctctgcttctcaaattttacctactatgcaaagtcttgatcaggttccactcttctttagagacatttcctatactctgtggtcatcattaaactttcctccttagtctctattccagcagctcgaatcatctttaatactcatgtgtgtatttaaacatccatcctaccacataggtgtttgattcagtcatgtgtgttttatattatgaattaggttttaagtctcatctttggttttatttacctcctcatacctagaaaaacagattaagcacttgttctytacaaggccctgggttcagagtagtagaattgagagagacagaaagagctagtttctgtcttccaggagcttggtttcatcaaagacataaaagccttgccattaactggagtataaggtagtatatgagatgtatgaagaaaaaatcctttagtttgaggtgaaaaaaaaaaaccaaaaaggaataaggctaagaaggaagagaatcagaggcatcttcatattgcatggatagttgaggtgggccttgagagtaacatatgattctgatgggtgtggttatttcaggtgggagtaaaggcccaagggaaacagacatgttaagtgcatggtgagtcggccagttgagtcagtatgaaggaatttgctgatagcgaacatttattaagcacgtattgtgtgttcagtgctttgcatgtattgtctaatcctcacacacacaaaaaaaacattgttcctttttggaaataaactgatggtgtagaaatgatgatgatgatgatgatgatgatgaagatggtgatgatagtgacaatctgaatggtgcagaaggaaatgggatgccatgcatgagtctaaggaagactatgaggaaggaataccactgaactaattgaatgcggagaaggaaggaaacgattccatgcacattagtaatttagcggttgttagattaatgaatctctgagtgacaacctcatacatttattcaacatgtatttattgggttctcctaagtctttatgtatttattaatgtgcaaaatcagtagatttatgacaggaagtgacttgtgctccaatttccagaaaacattcattacttcttcctgatgaagctgctcagttaaataatattaattgttcttcccctgatgttatacaaaaattaaaattgatagaatacagaacttaaaagacatttttactttactttttgacattattcattgtttgttgctgatgaatkaaacctcttttcgagtgtgtgttccctttaataggcactggtaatttatgtactaagatttatttctgtatggaaattacaagtgaaatttcatattgaatttatatttagcctgttctagtacatagtctctgcatagtatatccatggcatcctacttaatattacagattcttttatattagtgctgctacatgtgtattctcaagcttttaattgtacaattattacaaaaagaggtaaaaatatttcccctacaaaattgttgctgttaattttttcctgtttattcatggagtattcaaagaagagctgtgtgttcattacattccacaagttagtccattcagtttgttcaaaatatgaattctgatgtccagcagttaatataagattttggcaggctattaataatggcatactcaatttgtagctctttcatccatgtaattttggtgatgtatgcactatgttccagggaaaggaatagttcaagattaaagaggcaatcagtgtattggtgcttattttcagtgtgtcaaagctgctaaatgaaagggtgcaatttctacttgtacaatttccacttgtgctgctcaaaaacaagccattgatattagacgtgtatcaagcatacgtggttgcagatgtaaataattaacattaaaaacattttcttctttagttgtgtatttagaacagtgatacttagttaatatcaacagcttatttttagaatctgaattttaaaagtagtgaaaatacttctagtgattaaaacaatgtatgaaaagaaaaaaattagtaggctattttaatataattagtgagtatgctattttaacataattcaaagatgcattcctattttaattaaagctcattcagtatgcaagaattccagtttccattacttcttgctgctgctgtctgatcttgtgtttcttgagggacacttcttttatgagcaattcttttgcatttgcacccagattccttcacgtccaaagcagtagtttaaaagagaaggctacatttttccattttggcctggaacttagatttttgttctgcttacttcttctttaagtatagtgaatatataaacttgtaggcactcctttgcagacagacttcagaatcacatgttcagatgaatgtgggaatgtaggcagaaatcagaaacctgattgtgcttcaccgcttcagaccctgccctatgaggccctccttgtagaagaagaaatggaactgaaccaataactgaagtgaaaaacccttctggaaactgtatatatgaaaagattccatttagatccattgaattttgcctttcattttcaaacttgcaaatagaagcagcattttaatatttttcaagagggggaaaaaaaagagcgtggttccctggccctattgtatcacttccattttgtctggaactgatttcatgcaggagakgcactggaatcagcatgcaaattctatgtggctgttgttcagtctgtttttgattcatcgtggtaaaatatgcataccatgaaatttgctgtcttagccattgttaggcgtacagtttggtagtgtcagatgtgttcacattgttgtgagaaagagctccagactttgtcatcttgcaaacatgaaactctgtacccattgaacaacaactcctggttttccccaccctccagtccctggcaaccaccattctactttgtgtttctgtgaaacatcatataagtggaatcatgcgttatttgtctcatgtgactggcttatttcacttagcacagtgccctcaaagttcacgtgtattgcaacatgcatcagaatgtccttcatttttaagactgaataatattccattatatatacagtcatacgtcacttaatgacaaggatatgttctaagaaatacgtcattggaccatttcatcgctgtacgaacatcatagagtgacttaacacaagccttgatggtatagccaactacacacctaggctaatcgatagaatcttttgctcctaggctacaaactgtgcaagtatgttactgtactaagtagtataggcaattgtaacacaatcgtaagtatttatatatgtaaacatatctaaacagagaaaargtacagtaaaaatacagtattataatcttatgggaccactgtcrtagatgcagtttcctgttgaccaaaatgtccttatatggcacgtgatggtatatgccatattttgtttawctcttcttgcatcagtgaacacttgggttacttccacctcttaaccggttaataatactgatatgaacatgggtataacattctaattawgttttgttcatctgtggtgggtgtgaaagttaaaccaatggaacctttttttagtgaatttagtcaaatttctgaaaamcaagaattcctatggaaacatactgataaacatacttttcttattatatattaaaaatgcttgtagggaaaacccagcttctaatagtactctgggtttgtgaagatgcagtaagtgcttgctaragagatgtttttaatctagagagctagagcagagacttagagttcacttgtttcttctctttttttcaatcatttataagatctctcatcttaactcattaaaactggctgattgactttgattactgacacacccaaactatttcaaaccagttagttcaaaaatgcagttgcctctttgaattatttataaaaaggatctcattacatttttccatarataacgatgatggcaaaggggaagaagggatcattatgccactcctttaaaatgcgggcttctggcctggcacggtgactcacacctgtaatctcagcactttgggaggccgaggcaagcggatcacctgagggcaggagttggagaccagcctggccaaaatggtggaaccscatctctgctaaagayacaaaaattagccaggtgtaatggtgggtgcctgtagtcccagctacttgagaggctgaggcaggagaatcacttgaacctgggaggtrgaggttgtagtgagccgagatctcatgactgcactccagccagggcgacagagtgagactccatctcaaaaaaaaaaaaaagtgacatgctggttaaaggtccctgtccatatcccccttttgcaactatttaatccccagcaaagtcctagccaggatttcctggtaagagtttttctgctctgcgttgtcaacagactattttctccaactgagctcatggaagtaacctagtttctatcactagtgggtctcagtcagaaaaatatgagtgtaggttattgaagtgtcagggttgtggtggccctcttggctgtgtgcttactggggatgaagtacatggtggaatgaaggctcttactagggagacttctgagttactagtttcaccacacagctgtctcacccagtatcttggaactgtttcttgcttcatgtgtgtgaaaaatatagtaaatttcctggtcatattttagcataattaattataccaactattaatttaatattttgtttgatttttagtttccagggtaaaacattaattttctctttaatttccattctataagawtcctattgttttcagcaaataggagtttccttctctgtaagcattgctgactcaagactatataatgttagaaatagaaaaaagatragaacatgttagtatcaatagcctttattattataatcggtatgggcctaacttctgctagcaacattaaaaatcttttcttttactctatcatttagtaacggattttcttttggttgtgtcgaatagaattgtttccttgatgttccttgatagagagtgttctctttaatataggaatacagtaaagaaagcatccacagtttgtgaggcagagtttagtgctgatgtgtacagaaactcaagtgatatttagacaactgagtccttactgggaatcacttaagccttaaaacatctctgccattatgctgcttattttacattgttctggatagatgctcattatccasttctcattcatgatgagcatgggattgataagggagctgacatgaaaattatggagaaaaaatgcaaatagcaaaagatagaataaagcatgtatacctcatgatcattttccccattgatattgatttggactcactcttgatgtatcaggtgtgttcaatctttggcaaacatttagggttttcgtttttgctgaggtccacttgaaccctggagcccaaaagaagtaaccaaaaatttctatagcttagtaaattccatgttctagaacttttmatgtggacctcagaaaaaggaaataaccaagagtgccgaaagctacatgtactttgaattgttcagcatgtataaaacccaatggctaaccgtgtctagaaagaaggagataagtaaagtaagattggagcctggcgtttggagttcagcaacttttctctgttgtgcgctgacatttaagttaatagagtgatttctggtggatttctttgaaacaagacagttcatctgagatttggttaaaaaatatttcattactttgaggaagtgattagggttggtcttatttagttggggctttcaaaattgatagttttgcctgatgrtatatgctaaaacattgaattgtgagtttcctagccagactggaccctaagcccatcatttggaaatagtctttcttatttttgttattcttgtatttattaaagaacattggactagtgaaaattacaaaagaaaggaaaatgacacaatacactacattctgttgtatcccatttctatctcakggaattatgtgtgtttaccaaactgatgtctagatgaacattcaatttcgtatcttgccatttaaaatttaacatcatgtgcatttttatgtcattaaatgtccaaacacctggaatttttacgtttgatttgttattgctaaaaagtacttctcttgatttttaggggttttcacttttaattaaaacatattcttgaaactccttctcttctccttggctaaacctgttatgctacaggacttcaggataacttgagctgctttggctctttgattaagtgcagatgtatttagggtttgaggtgaaagggtttttaggacaaatcgcattccagtttgagggaaaaagagagagaggaagttttggaagttacaaattcattaaatttttgcttccacatggaatccacaacttttccttttccctggctgcctttctcttcttcattgagttttccaggcctctcttccttctgcacaggctccaaagagaatggctgactataagggttattagtgatattttgggagttattccgttcttatccactctcccaccaacacacacactctcacacctcctcccatcaaagcttgggatctctgggaacagggaaacatatcaagatattagaagaygtcaatgttatatatgcagaaatggtgaaaaatcaatgaatttagtaagttaaatttgtttgggtagcattttaaaaatatttaagtactttgacatatgttaccccctaatacacagagggtgctcagacagcatttgctacaggagtgaaccctggccaaagctgttttaaccaagggacagtggargcccagagaggttcgttggtttgcttaaaatcacacatccatgggtaagcaaggtgatggataatcagctcaattgagtcagtttacattgtatacacataacaaagcatcatgttgtgccctgtaaatgtatagaattatgatttgtcagttaaaaataatattaataaagtaaataaaatcacacatctcacattgagaggagggcagcctagacccagatttctgttagccccargaattgaggcatatatgggagactagcagacaacacacataggaaacttttgccacttaattattattctttttctcaagaccactatattcatttgggtttgttcttatgcttttttttttttttagcaaattaaaaaaaaattatccttgaatgattctaggttagctttttgactaatggatgttggaaggagctcagtgacaaaggccagggattattttgcttttcctcacctcttcctttgttcctcctcatcatattacaaccttctgcttcaggattccttctgctttttagcaggattgacatgctgggccttacccggaaaggcaaaggctgatttgattagggaggtctttgttccaggtatctcrcatcagagagccttcataacaaatgagaggartggattagaagtttcctggggataattttttgtctaccctttaagggaaatcttgccttcattaattacatctcaaatggaatatgtggaatatagacattttcataatcaacaaggtgattttcattttaaaatgcttaaaaaatgttaagcagcatgtatgcacgcacacacatgcaaccaatttcttscacctttttcttgttttaattcttaaaatatgaatttttaaatataaggaaaatcctaaaagcagaaactaataaatactaataaaatgttaattacattgattaaatcattagtattttaagatgggcccctgaaatgtctccataaataagcttaatgtgctttcatttaaacaacaattcagttagtaaattcaataaaaagcaaactaatgtgacataaacatatttatgtgattagaaaatcattatatccactttaagtgaaaagaaaaagtcttcatttttgtgttacttttccaaacctccttttggcactgaattgtactttatgggggtgtcttgtcatttttttctaaattaactacacctctgcttgcctggaaactagagccattctgacttctattccgatatgtgtktttcatctcctactttttttttttttgagacagtcttgctctgtcgcccaggctggagtgcagtggcacaatctcggctcactgcaacctccacctcccgggttccagcgattctcctgcctcagcctcccaagtagctgggactacaggcacgtgccaccacgccccactaatttttgtattttttaatagagatggggtttcaccatattggccaggctggtctcgaactcctgaccttgtgatccaccctccttggcctcccaaagtgctgggattacaggtgtgagccaccatgcctggccttcatcttctactttttttatttttaaatattttttattcactattgctgacatcactctcctacctactcggtattctttcattatgagaatctcccacatgaaaamtagtggcacctctggaactcccaaattctagtttagacagattaatccacatttatgttactatttataacagcacaactctgtaaataaatccaaatgtccatgatttattggttacatgttatgatattctgtagaatggatattattgtagccaaaaaattaatttacataggtacacagatgatgacatggtaagctttctttaattagaaaatgtttctttcatttaatatctttcatcttaagatcaaaaacaatcttgcaatattgaccttacagcactgttcttctgttatcctcattaaaataatatcaataacaataatagtaataatggccattgttgttgttatgttctctgaggcatttagctcagagaatgttgagaaaaaaacctgacaaagtacttaaatattcttgatgccatctctctcactcttcataggttgtggatataaagaactctgtttttttcattttttataagccacaaacaatgaagtaatcatttctttgttaaaacaagaatgtgcagattattctcactgaaaagttaaaattgagttgtatttaagaataagcatctagtcttgaccatagtgtttatgcctataattaaaacaaaccaaagccaaaaacatatctttcaaatggtttggtgtcacaccacaaagcgagttattttaaagccattggaggattctagcaactgagcaaataccgctgatctagtcaatatcaattgataatgtattatatgaaggaaagtaaaatctctttcaaaactttatacatgtttcaattcagttaattatgtaataatagaaatggcactatcrtataagagggtagatgatataatttatagatcattttatcacttaaagcacctctaagtgtagaaatagaatcatagaacctcatattcaaaagcctttctgtttatctatagtggaatcgattaaatcatatttgtgtaataaatgacagtcataacaaatacagtaattaaaatacagttgttttacaaatcactgtcttccactctttccacttccagcattttcttttgatgggttagaagattaaatagcaagttgtaattttaagttatggctctttgacagtggaaaatggattaaaaaaacacacaacaacctactaagtcttgtagtttcttccatgtggtcttttcttatctagagatagtaagtcaggcatctacaggaaaagaatccactctagtgaattcgtgcctgcctttgaactgtgaaaatcctttgcattgccccacatttctaaagacccatgaattgtgcrgtcagctagaaatatcctgtttcaaaattgagattacgtgacactgccctagaatgacacttgagctgaatgctcttgtccactgctgtagggtacacatgaaaccttttacttagaaatttaaggttcttcatgtggctggaaaaatgccacaacatgacttttatcaggctaaaatttactgtgtcatgaygaaaattgaataaagtaatcttgactcattttaatttatttcacctatgtctgactccagctttatcctaatatacaggacaaaagttatttccataggagcatctattatttgcctctatttctaaccctgtacaggtatgttagaaacactgaacataattttatatatgtctttgtctcatcaatacagtgcagttttattttttaactgaagaattcgtgttttgacatataaggggttaccagagctatccaattttattttatgaaacaaaattgtaattattcaaagtccaagacatgaacagaaaataaaaagtaatgtttaattcatgtaagaaagcataactgaagctcattagtcaaactaaaaagctcatgaaatttctcacctgaatctttcctcaccctgggcagagacttcctttcaatttgtgctcaattttaggcaacatttaaggatctgaataggcaaagagtgagagcaatgattgtaaatgtgttgttttaaaaggtttctccactaaattsgtatatgacaactgaaaaaaaccttgggacaatgtcattcagaccacaggaaagtgcttgaatatgttctctgatgctctttttagagcagctgatataaaaagcaaagaattttatgtccaaaagacttaggcaaaatatccgaacggaatgctgaatgcatggcttttcaatttatcacagtttatagacactttacatctatagtagtaatttaatttaatttcttagaattatggaaagaacaaatggtatcatttagtataaatggttctctgctcccctcacctccggagttttaaagatggtaaaactaggactcagagatgtgaagtggctcacccttgatcacacaaggagacagtgatatattttggttgagcccaagtctccttctgaatctagagctatagctgttaaactaaggtacttctcaatcatatccatggagcaaggatgtgagagtagttggcttttgtattatatgggataccactgcaaaaaagtaagcatgacagtttcaccttaggggtgaatttcatgctttgcaccagttcaatacaatgatgagagaatggctctcatggtactgaattggacactgtacaaattcatggtgttattcatattactggccataaaaagagcaagatcacatttatatatgttctggtgaaaattactctccagtgtttctgctgtcacctacccaaaccaagctgtatatttttttcttgagaattttgcatccatactgtttcttgtttggtttgcactgacraagaacattcttcctccacagcacagatctagttatttgcaaaagatatttttaaaattataagcaaatgttgatttagactccttacacattaattaagagaagcacttttgtggatgttctttggcttagttcaagactttgtcaatctgacttttcattaagactttatttattattttccccaaaaagtacttgttgctcagatttgaataagagtagtttacttgtctacagataaaaacaccttggctgtattcaaagagtaaaatatttaattcaaattttaggctatctgaattttatcctttctgcttagaaatgataaacaaatatttattcttttattgagcaacagctatattccagaaytgttttaaatgcttgagattggggaatagagataagtgatactagcttggtatgcacgtatatgggtgaccagggggattgttaggaagaggaagaaagagaactattacaaacacgcatttataaggcagcttttaatcatcaataaaatatggtaaaatatgttagtttattaattatttgattaaacacatacttttttgtatgtgaaatactcaagttaatttgtcttgtttatttggccttgcttgaatttactaagtaaacagaaatttctagccattctcaattcaaatgaccacaaattgagagaatcaggaacacttagatacttagccaacacttttcactaacttatttaggatatatgcctgagatcatgacaataataataatcatggtaaaagtagcaattattgttattttaatagtcataacagatgagtgttgccatggaggtcagtatcacaacacarccaagtccatctgcctcattttgatgttttagtggccacctaactgataccgtctggtgacactcaggtcagtgactcccgctttttctaagggatggcctcagtggtttggggaaggtgccaaggaaagctaactggggacttgctcctgataagtcagtgatcatggaccacaacaggtggccatgaccccaggggggctttgcacacttggaaaggtggagttgtgcaacattttgctgtctggctgccaccttcagtggcagatctattgccacttgggttgtctttctcataattatgttccgtatttctcaatatgacagaagtttgttaacctagttttagttctaactctgccatttactgctcatgtgacccttggcaatctgtttaaattttagcattttcatgtttttcccacctataaaattaatatacttttctcaggttagctgtgaaggttaaatgagatgatatatgtgaataggattttgtaaactttaacaacggctgacacttactcaatattggctatggttttatcagataggcatggattgagttatgcagcttctctgttctcaccttgtccttggtgcctggggaatgtctagtattcgtagtcagtgcagtcatcccagttcctgcaacgtggtactgataggaggaacaacaatcaacatttaagttttgtctaacttgcctaagtttcttccatttacagtaagtgatgagaaatggggtataagtgtgagatttatgtcactattcaagtggggatggttaagtcaattaatattaagtaatattatttaaattaattattgtctccttgactctaatgtaggaatacattatataaaaagtaaagattttgtcatctcatcatccacagtgttttgcatgtgctaggttcttagaaaatacttttttaatgattggcttttgtgtttacctcaagagtatagagagagactgaaaaatatgtaaaattatgataatcctgaagtttaaggttcatgaatcaaattttcctcttcaaacaggtgaataattttgaaatttattagtaaatatttaagttgactctttcccaaatactgcctaacttcttttcttctataattaagtcagataattttaggaaattggacaatttagtcatctttctatagcatgtacactacagatgactattaaattatgattccttcagaatctttattttacaagaatataattaagcttggctcagtggctcatgcctgtaatcccagcactttgggaagctgagcggggtggatcacttgagctcaggagtttgagaccagcctgagcaacatggggagatcctgtctctacaaaatatacaaaaaattagccaggcatggtggcacattcctgtagtcccagctacttgggaggctgagataggagaatcacttgaacctgggagacgaggttgcactgagctgagatcrtgccactgcactccagcctgggtgacagagccagaccctgtctcaaaaaaaaagaaaaaaattattcaatcatttatattttctggaattttttctaaaatttctcccagatactttaaaaatactcctgcaaacaatttccacttgcctagcaggccattcagaccacagaactaaaagcaaaatttatcagcctttccttccaatttgccatacccccacaaatcgcacttataaagtcaagagtaagcacatttctaacaaggaccaaaacttttttctcaccaatgrcactttcctatatcaagtgtacctaatcaggcctatcattaagaaacacaacctttgctgtcctctgctatatcacatcatcttttcaattcagattctatttacaaaaatcctctaaactcattggtttttctacaatggtttttgatcacattatrttactgacaaatgctatttttatctcctatatgggtgaatcatgcatattaactctttcctgggatgatggacataaaaaatctcctttagagatttaattacatttaaattattttcaagtcaagtagagtataaattcacattttacaacagcccatcatagaagtctcactggatttgttttctttccgctaatgtcccaggtcacctatctgaaataagctacttaaaaaggacagggtggggagatggcagagaactgtgctgcaggtttgggaagcaaagaaacaaataataatgtaaatgtcatctgtgatctaagattgctatcagtatcagatattttggcttttggtcctctagcctacctaacatagacttttttttttctattcaaaaaaatattacacttgtaggaaatgactagtgttgactttctcactctgagtccaattacgggttctttaaactgctcatcgctagtattatatgatggtcagctttaatgagtgctcagaagcactctcattatatacaaggcttttgaaataagctcctgtctcgatcaattgcttcaccttcttcagagcaattagcataagaataaaggaggttaaattggacttccgggctttggtgaaattaattaataccacttcaccggtaaggacaataagtagataaccattttcattactttatgtgaaagacagattatcacatgcacagcacccagactagtacaaaagtaacccatgctgaatgtgctatcttttaagtccatgtattatgaaagatttttttcctgtaattttaatagctcaaaaaaagttttaatttattggtgacttgagctgggtaaaggttggccattacatactggcaactgcttgggtaggatgtaagttgaaaaatataagaaaaagaatggcattaaaaaaaaagtagcctgactgggtgctgtgcacttgtagttccagctactcactaggaggctgaggtgggaggatcgcttgagtccaggagttcgagtccagcctggaaaatatagcaagacatcaccccaaaataaaataaaaggaaaaaggaaatatctgtactcagatataataagctatctattctagacaaatgactgattagtattttcatgctcattcttgtacataaaaggtaaagtgtcctataaccatcatattttttggaattccagagcataatgccagcgatttaactgtatggatagtagttaaatccttaacaatatatagtacatgttcattttctaaatagtagttttaatgttataaatgaaatgcagcttttgcaaattgaaaatcatgataatagaagtctgtaccctccctttatggcccattaactatctttgcatcataatatagttatctttctcaaaaaaattaagcatttagctctctcaaagatgctgtcacttttttaccctaatacgtaacaaagttgaatggactcctttcctccactgttgtataaatttaatctacattacaagataccacactactattcaagatctatttgagtgtttaggcatttcttaccaaaataatctgatacctactttttaaagaagtcaactggtcatgtcagtgaaaatggcttaattttggcatatagttagtaaaggctaaattgcaagtccaatctatttttctgatcttatgtgttcacctgaaagcaaaataatgagttcagatattcttgcatggaaacatactcattgtgatcagaatgaaggaagttattgctaatgcacttacaaatatgtttatccctgcgagctaatgtgtctcaattcctgaaagtcattattaccttgctcctttctagtattttaaaagatgaaaaagtgataaatttcaaaataataaaacatcattatttttgacattgaggatgtcattttgtaaattaacctatgacatttttactttttggttaatccttcagatttactcttcattgcttttaactatgaattaaagtaatgagttgaattaggtaaatgtctaacataattaccatgtcctcagtaaaagatgattgttaatgtgtctgatgatggctggttgactagaaattatcttcagttccacattttcaaaatgaatgcaccgtgggtggaatggaaaataataatttaaggcacattaaccattaatatagatctagggtgaccaattgcccctgtttgcccaggacagggaactttgggttttaaaactgataccaaggggtacctgggatgctgaatgttcagtgctaaaaccaggaaagtccaggcaagtgctgagtggatcaggctacatagattactgcacaattaattatagtaaattgattctgtatgcaacttaaataaacccagtttattgaggcatgatccagtttgcccgtgtgagaacctgatttctgtgaacrtggagatttagccataggtggctgaaggagagacataatatagatgatgatgttaatgatagcaatggtaaccatttattgatgacaggactggacttttttaagacttagccaaagataacattctctgaaatctttcttgatatccttaccctacccagaattttctgattcttcctttttactcccaatgtaacctgtgccgaagtttattataatgcccttaaacttccttattwgtttatttgtcttcctctgctagaatataagcttctttaggaggatagaggcattatgttatttatctttgtaccccaagcatccagtatatttagtgaatgaatgaatgacctaggtatttttttttactcttcaaagtaatacaataaaatacatgataccatcctgttttactgatgagaaacaagtatctaagatgttctgtaacaagcataagaatacgttaataaattatgaagccaaagatggaaaatcagatctgtctgattgcaaagccagttctctttccattactctgtattaaataatgctggccaaacatagtgacttggaggaccctctcctttcagtaagagagtaggaatcagatatacaaatgaagactatgtcagtcttattatggatactgatgaaagttttctggtaatctgcaaaatagattttatagataattgctgtggaaaagaagtgactaaatgtaaaatataatctctgctggtatgtttagaccaggmaatcaaaatgcatgacctagtcagacaaagcaaaaggttctttacgtgttcttcttgtatcatcagtgagcctttttcatttaagtacaatgaagtgtctctgccttaagaaattcttcagaggcagaaattcattattctttattaactcactgtgcccttctccttcttctgcaccttttcctgtgtattgtctcccattttaaaatgtattaactgagaactaaagatagcaaagtgttgtcaatattataaagtatagtaagacagcatagaactacatggagaatatattgatamcagcatcttttacacagtgatgaattaataattaaaccaaacaaaaccaaacaacaaaacagttttacagctacttgggaaatatctgtaaacaaagtttcmtaataattaactcttggaatatcgtcacttgtacaaatgctgcaattctagcaagtttgggacacttacaggaaactgtctgcaaataaacatgtataatgattttagtgtatatgacatgaaacagacggcgacccatttattaaggtccattacacagatataggagggactttaaaggcatcacaaaatacttgccaggaagtaaatgttgactatttccaaatctcagtgcaaaatgagatagataacgttaacatgcacatggagtaatacattctttaagtacctattcagtgaggacctgctatgtgcaaggcacgtattccagatatatattaatgaaaattgtgatcagttaaaaataaatgttactattttcattgatctcattttctattttcaataaatcaattacaggtaaaatgtgttatgagtgacaaaatgactggaaagtttttgccttaatcaaaatttgtgtaattattttttgtaggtaatcaggtgatttagaagcttaggaaattatgatgctatttttatagttattatgctattattatgatgaatcacccattcatgtgcattaagcagcattgattaatatttagattttcagcgttttaagtgtctgtaccttatttacatattattaaaaagtcaccttggttgtaatcatctgtcttcccatgatcacaatacaggtttgtggttttcaatatgtcatgactaagaagagattttatggtgcttaaatatgtagtaaattcattaaaccttagtcatgagtaaaatgatccctgtaataccactagttgcataatacctgcttctgatgcctgcttttaatttttctaaatacattggctggtttctagaagataaatgtaatattctacagagctatagactgttttgccacttggaatatctcgaacagttgtcatgggcaaggccgcaggtgctatatcccaagtgtatactgcttttatttttacatgtacaaaatattagaataataaatatatggtaaggcttctagaaatgaaaactgttgtcaatctgtaatttatagaaaatttatgtaagaaaacttatgttgtcttttaagcaattctcctgcataataacttagtttagagtaagaaatatgcatcttatctaaactgatttatagaccacatgctatttttacaaatatttaagaaaattcctagataaactttggaaccaaaaacaatgtagcctaataacaatgtcaactatacttacagtataattttatatataaccttttatctttataataataaatactatcacagccatttagagaaggcaattttagtttacctctattgcttaaaggctttagctattatttatgcacaacaagaattctgactttttaaaattagttttaaaattttggatcagctttataaagaaacacattgttgttaagtgcagacaaatgagaaccttgccatttctgcatttatgaccagaagccaacagagtcaattttcatgtttatttattctttgctttagaatgttatgtcagttgacagtattcagggcttgtgttgatgtaaattgccataaagcaaggaaacacgggctatagtactgtcagggaggctcagcactgcagaacaacacaatttaagaaaagcatttgcagaaagattcagtgtcagtcttcggaarttgactgtagatgcaaattggcatcaactacttcacaatctccctctaacaaaagagatggaaagggtggaatcaccaaacagagtgcacttttcggcatagtagctttcatgaagacaaaaataggatcccatttgttcattcacaatggatattcagactccacattctgccacccccatgttttattggagcctgcaattctgccaggagaagggttgcctcatgctaattcatcctaatgtttctcctccttcctacataggggaagtcttccaacccttcctactttttaagattagaagaaaagattcctcttaagccaaccatctctttggttacctttctgtaatgcctttatactgatgaaatgctgttatgttttacctaagttcggatattgtcattgtctcctgctgactcaacatgcattgtagccaggatcctggtctaaattcctgttatacaaaaccctgagctcttctaatttgcttcttgaaaaaaaaaaaaaaaaagaaaatctggccaggcacagtgggtcatgcctgtgatgccagcactctgggaggctgagatgggtggatcacttgaggccaggagttcaaaaccagcctggccaacatggtgaaaccccaccgctactataaatacaaaaaaactagccaggtatattggtgcacgtctgtgatcccagctactccgggaggcggaggttgcagtgagcagagatcatgacactgcactccagcctgaacaatacagcgagactttatctcaaagaaaaaaatagtcagctctagaattcttagggcatagaggcaatgttaacaaatcagaaggtacattaccattttaaaaaattttgtcaggcttatactcagatctctttaaacattacctacatttaaagaattattgtatgtaagagataaacacacaggaaaaaatatttgatttttgcttttgacctgtgtcattaaaataagatgattctccttatttctcaagaggcattccaattttaaatagagtggtagggaaaaaagtgattttagcagggatttacctgttcgtttgtactggtaagttatttttgtgttgataaattatttacactttaatggaattgaggtgtcatcatcttccatttatattattttgccttcctttttcacaaattttttactattaagaaagctacaagaggtgttatttgaggaaacagtcctataatatcattctttttttaaaattgacagtttcctcaaatatttatgggggaacctttctacttctcaaatttgaacagacaactttagtcaatgcttagcattgattttttgacaactcatgtccatttcaacattttattgtgagatagctaggaaattagttgtaagagcagaaaggtaattaggtaggtggtataaaatttttgacagttttgacactactgatattttcaggaaaaaaaacgcatacatatcctagtttagagtaagtctagctgaaaatttaaatatatttttaactgaacataatttttgagtttgagataattttagatatacatatagttgtaggaaataatacagagagaacccctgtaccctttgtccattttccccaatggtaacattctgcaaaaccatggaacagtatcacaagcaagatattgaccttgattcagtcaacatacggaatattttcatcagcgcaggaatgtgactattaaaaaaaatttaaatttttgaggattattctacctccaaattctttagtactaaatattcttacatctagacaaactaaaataggatttataggaaaaatgatttgactagagagtcaatatgcctgaattcatatctcagctctgccaccatcactggtttaattacatttggggagtcacagcgtggtggggcctcaatttattcttttggagggacttagtctaaatcagtgattgtcaactagaatgaaagtgagggaactcctcccttggagacttgtcagaatyttggaggagacgttttgcagacaaagcccaactmttttccytccacactcctacctccaccaccatcacaagcaaattctgatgtttgttcctagacttctaagattttgactccctcatcttccattgaggattgcttatggaaacaacgtaatagattcctagcaaatcttcatgtatagtgtgtcagcaactagtctcaagtgtctaacgttcttttcaactttaaaataataataagaaaaaatatctaccaagaacactaaaaatctttgtgcttcacaccatctagctgatgacgcataagagtagaggaaaatgtggtcaatacatgagccaaattcagagtggtgcatgcagaaggcttcctccaacagggatttgagagaaaggagatctgaggaaatccagttccactagggaatgatcccacagaaatggaatcttccagcttgagaacctgaagaaagtgactcacactacatgagaatttgaccctatctgatgctactttcaaacatatttgagtatttatagtttctaatttttggaatacgtagctttctctataattttgataccctatctccagaaaagatttattataaagttagagcacaaagaaagaaagatacagttgtgtttttatcattacaattgctgccttaagcatttctttctgtggtctagtctaagttattaaacctcattagttttttacttctggttagtgctgtctccttgattgtggcaaatgcaagttaccaatatgactctttgctacttctttccataagaagacaaaatatatggcaaaaagagaaaaaaactctaggattccaaattataagcactactcatattgaaagttagaaaaagaaaatgagcctgaactgaaaatcaaacaaaaagacgagaaaaggaaatggaaataaagtttccctgtatcccattagggttgatacattaaagaaagagtgaggatagctggaaataatattttccttcaaatgacagctaaatgagatctttggagctgtgccacaatgagtgaagtcagggagacagggccggtagtgacaggaggagaaaagtgcttcttcatgtgtcagccctgggtttaaaataactcagaaggtataaaagaaattccctcctcagatacaagattatttgtgggacacctgattaccatttaagagatatcaacagttaaaggaaggtgatttaaatctggatagctcccttttaaatccagccctctgattctataaggcaaatgacaaggctgtctagacatggagtacattgagcaaggtttagatgagggagccccggagactgtgagacagacctgttctgtgcctgagaatgtcagtgatgactcacaggaggtggagaaaagtgtgctcaatgtatgggccasgctcagggagctccttgaagacagatcatttggtattaatgatacagcgataccacaaagcacaggaggtgtagcctgctagcattgaagttaggaactgatttgaattaacccagtgtttgaatctggatgcaagagcctgtatggtatcttgcatgctaacttcttcataatcttgttcctgaatgggtgccagattgaggagtctttgggatagttgatatttcttttaaaaagcctgatctatataaagctgtatcaaccacgtgcaaccactttagcataccactctatattaatagaatagaaaagataattagcagagaaaaagagccaaggaaagctaccaagaattagtgaaatataaaatgtgttcttattatcccttcctcaataaaggggcaaacaaggttgttctggtatcatctgtgggaattttacacaaactattttaggaggaaggtgggtgactagatgatggatggatggatagctgatggatggatggtggctgaagtgggtatgtgcattgaaagaaactgcaacagagcactatcttctgaagtcacttgaagttatcccaaaggtcaggggaagaaaagggaaaaccagaaaccacatatgaaattagcaaagctgagcccgagtctgaacgcactgtgaggaggaagcaccattagggaggtgatccattgccagtggaaagccagaagctcagaaccattagctgagaccgtgctcctcccaggcagggaccctctagttgcctggggagatgatctgaattcacataggaatggtcgttgcctcttccatgaggatcatgagaacatcactaggtccaaaccacaagctgttcttgtaaaagatagagtaaatggttacatcaaatataatcataactgtagtcaacctgcagctcagagatatgtaagagtacaagtaaagctctttatccacgtgctgaacatttttattaaaatgtgtgaatgaaaaactattttaaaaaatagaccaggcatgatggctgatgcctataatcccagcattttcagaggccaaggtgggaagactgcttgagatcaggagttcaaatccacccccatgagctagtcacctcccaccaggtcccacctccaacaatggggattacaattcaacatgagatttgggtatggacaaatatccaaactatatcaggtggttactgtagagaaggggagaaatgaactcccttaacgttccagctagatcttacagaagaaaataggaattagttttgatggtatacagaaaggaaaaccatgtgaaaacaaggcataaggctaccaatatgtttaatgagaataaaaggaagaaagaataagtgactaacatacgtacgaaacatgcagctcttagatccatgttccttcagtgctctttatacttttcatggcttttcccacgtaagccgctcaactcacctaaacttctgtgccccataaccagtttccattaattgacattataaccatctttcaaagcatggagcagatacggccctttttcccagctacgaggatttgtcaaaagcagctttttaaaatggttatcttcgaatgtgcctaatttttcttatcacactgtaaactttttaagtcaaaaatcttatgatcaaatcatcattaccatttattacttttcatcttcacctgtctgcctcccctctgctcaaccccagcccctcatgcagtacgtgcacaataaatatttgttgaattatgaatgaatacctaatattgacatgcaaggagtttcatgcctcagttaaaactcccagaaaatctttttccagtccccagttagagccagtgtaataacagtgactttttttcaacaattacttaaataacattattaaagcaattgttgctttaggttgttcattaataaaaataaatgtatattttctttactgttagaacagtttgattctgtatgaattcctattcctgattttattatactcctgaaaccacagcttgctgctggttcatctattaggcatttgaaatgttgaattactttgaattgcatttgttcttatattgcctaggctctggttggcctcctagggtcgtcacaccataatcttaaacacaacatgtgccttgtggcccagatgttttccaagagggagtgctgcagccaagaaaagcaagatagtatcttgaatacccaaaggggttgatatgactaaaaagcaaccgtacagccaactgtagagctgtccaagaaaaagtgagcctattatttgtatagtttaggtttttgtgatcaaatagtaaaatttgcaaaagtttcatgataagatcttttgcttcacagattctcgtaatatctgcttttgtagtgtggactccagtgttcagcagtttgtagataaaactgggatcgtggcaacaataagagaaatcaaaaaaaaaaaaaggaagagttcatggactcttgtttcttcataaatgtgacatgataaaaattacctttctttcttaatatttgaaaataacataaagaatgaacaaagattgcttctagaactaaacttggattgaggcaacttaataaacggctgtttgttgttgtttctgttcttttcttctgacaatatttaccttttatattcttgtggagagctgagatacctgcaattgtgcttttaaaaaattgttctgtcttcttgcagtgaggtctcttttttggcttacttattaacaaagaagcaaattacatatatacatatactttatgtaacatgtatacacatatgtatatgtaacaatgtaatgctatgtgtatacatatatgtatgtgtaatatacatatacatatttatacatatgaaatataaatatctatatttttatttcatttacctactagctgattcacatcgttttcataaccaaaatatagctcatggcttgagtatgaaaccctgaccaaagtatggaatttcacatacatgtcatgataatgtcctagtcagattcagtcctacctcttgcttctgaaaatgtgctagcttctgttctaatcctaattgcatgaattagttcattgtccagtttagaaragaggaacgagtaggaagctgctttggttctggggtcaatctaggacttcaggtctattttagggaaagcattctagaatgtccttgcccttcctgatacactttgatataccttcaactttgagatcattgacttagtgttatcttgaatgagggggtccaatasagccagctactccatgctgatttagatctcaatgcttttgaaattcaagtttttaaagcacttgactctctgttttctccaaatgaaatcctattttgtatttaaaacagtaagaccagatttccccttttgaagtaattataggatcccaagaacccttaattccactggtcccatggtctacttatccccccgccccccacagcaagtcccttacccctgaggcagcttcagcgactcctccactcacccagcactgtaggaaaatgtctgctgtgctccagccagagcagacctactgtattgcaaatttatcgtggctggaccatcctccagagatgtatgccataaggacaatggaggcctcagctaagtacctcctgctgcattcattcccagggtagtaggtggtatagctgcaagacacggaacccagtattaggccttgctccattttctytaggcttcaaagctctgagccagtgatagtttataaaagcccaggactccaaagaattaaaatcagcacctgtagatctcctggtgaagataaactccatgggcatgtaaagaaagcaataaagatacacacatagtttttttttttcttttgaatatcaacagtaaccttgagcagagtgactctttatcagggctcttggtacttaggctgagctggtgatcacaaaggaaagaattagaaatttaaggtgattttattttattttatatttttagtaggagtatctggctgctatctaaggaatctcttctattagttacatggaaacttggagattttattgtttccctctcagtgtgtgtgtgtgtgtgtgtgtgtgtgtgtgtgtgtgtgtgttagccatttattaatcctaactcccccaagaaaagacaatctataaatttcattttcactcacattaaaaggtgagatgcaggctgggtgctgtggatcacacctgtaaacctagcactttgtgttgacttagtgttatcttgaatgagggtggacagatcatgaggtcaggagttcgagaccagcctggccaaatggtgaaaccctgtctctagtgaaaatacaaaaaattagctggacatggtggcgggcgcctgtgatcccagctacttgggaggcaggagaatctcttgaaccaggaatgggaggttgcagtgagccgagattctgccactgcactccagcctgggcaacagtgccagactccgtctcaaaaaacaaaacaaacaaacaaaaataggtgagatgccaattctcttcctgactctgcactccagtgcagtgctccatttcccctattgataataccaccccaaacatacctatttttccaggaccacatttcttcaaattgcactagtcatgctgttaagaaacacagaatctaaaaatgatctgagaaaaagagaattgcaattacaaccacaaaattttctatatactagtgaatggataaagatatttattgtgacacattgagcaatttttttgaaagttcatgtactcttgctcaactgattgaaactttgggaaaatgtaactttttgagttgtaagatcatgtaaaagttaaatgaaggaagaacagcaaagaagttatgggaattgttgttgtgattaagtagttaaatttgtatatttttttcctgctgattagggagttgttactgaaatacgttagcaggatccttcttttagcttttcacatgaatatttgggttgctttctgccttgataattaaaagagaattgtgtatatcttgttttccctaaagaaaggtgatactgactttatcatgtcatcataatcttcacagctagtagtgaaatacctttattgaacatccaccatatatataagactgttctaatctaaactcaataaacctttaaggtctatttcttattcttcttactttatttccataacttaattagccttcaaagcccaattctaatatgcataatgacttgaagtattttccaaatacaatcagtgatttttttgtgtgtgctaagtgttctcaggacagggtcaaaactacctattacatacattcaccatgagaatttagcacagttggcctctggcaacagactcaaagatttattctgtgtagctattttctagcctgctggattccagccagttgcctaatggatcatgagtgagtcagtttcattcagtctcttagcaaagtcaatttgtccagcagcacacaattttctgtcatgtagggtctttgcctggcattgctgtgacaaacacaatctaactgttttgcttccctagattccaactgagctttggccctggaaggctggcttagataatcaaagtcccctctaaggagggaaagatggtataatgaaggcttcctggaaaaattagaccctacaatttacccatctccaaaagtgggtcatggaacaaaaatatccatgtattaagttagattaatatttgtgtgtgcaatgaacaacagcatttgccttttgattacttcgggcccaaatgagctttctcttttaagtagcagaaaaataacaaaagcagagtacacctggaagggacagaatagtcacaggccagtgttgtaagagtcagtgtggcacttctgaaggaaatctgccgagtgcatgggatactagagcaccatgatgggcaggaggagaaacaccctctttctctaccttccttctctaccgccactccttcgagatggccaagtatggaatttctctgtcaggggtcctgccacctgacatgtgcaggtccagttaggtagttgaaaaggacacattactacacttatcagggttctcactacaaacaaattttcatagtccttctggaaataagccacatcaccgaatgcctttccggtagctgacatgattgattgtggacaacgaagaagtcacttattcctaaggaaragactggagtgagggttgctgtttgcacatacataaaatcctagaagagataccaaagctacattatgcagaaagattattattttagccagtggctctgaggacaacctcatttgtcttctctatgggtcactctttttttttttttttttcttttgagacagagtctcgctctgtcacccaggctggagtgcagtggcacaatctcggcgcactgcaacctccgccttctgggttcacgccattctcctgcgtcagcctcccaagtagctgggactacaggtgcctgccaccacactggctaattttttctatttttagtacagatgaggtttcacatgttagccaggatggtcttgatctcctgaccttgtgatccgcccacctcggcctcccaaagtgctgggattacaggcgtgagccaccacaccyggccaggtcactcattttttaagtgaatattttcatttccaaaaaaaaaaaaaaaagcctcatgtttccaaagtggcataaaaggccctggcatgtagagtgtagaacagaggctcctcctttttagccagtctctatttcagaaatcattagatagaacatacttggtctgaaaaaaaactatgaaattttgatcccccttggagaaaatgtactttaatgtgtatattagttttcatttccttcctctgatacagtaaagtcaaaattttgcgaaccattgtgaaataaggagatatgaccccataaacacaaacaattttcgttcccttgttcctacatatgtttgttaggagtacataaaagacaagttagctctatagaccctctaattttgagaaagagaagcacagcattttcctctttgattctgttttgaaagagtgcacataatgatgcatacctcatgcttgtctgccttcccctggactttaatttcttcctgtccagccaaaggagaaggtttttggcttggtttcagctgtgcttccatagctgctacacatcaaacctatcctaccaggtagagactagtgtattcttttcactgagggtagatggtcttctaactttaatcttccattctgcctgtcacgtctagaatctatctggttaaaactcacgttttaaaaatgcatgtcctaaattgtatccaacacttgttagtatcaattattatcataatttaaagcctagattgcagatgttcatcgtaatactttgccaatattcttatgactgtttcttttttcccatagataagtgttccaatttaagtgtgttttcctttccagaatgttctgtatgtaactcttctgacatttcagagattgtgttattactaatatttagtctcgtgaggtgcttcattttttaaagtattctttattgtgttttttcttcatgacccatcatggtgctcgatcagttccttgttttttcttttgagcatgactaataataataaagtctgagctctggtctcatatcacatattttaattgtataaaacaactatgaagacccacactgacaagatcctgagcctaaataaaattaggtcatgtctaaaagatattgtcctttgaattaagcagaaygtgtgggtgtgtgcacatgtgtgagagagagggagagtttgctcacacacagccttgacactgataatattttcccagacagcttctactcagtgactttgtagtaaaatcaaaggagctttagtgtgtactcattttacagattagaatagtagagcccagagagagtaagttatttgcctgaaatcccacagcgagggtccacgggagctaggactctggctttcaggaccctccttgttcagtcctctttactttgagtcaactctgacgggacctggcatggtgccctgcaattactgatgatgcgaaaggtgagagcggatgaaattttagcacactgatcaatcttgagatactaaaatataccagcaaagttgtgaactcgaaaattactaaacaggctgggcatggtggctcatgcctgtaatctcagcactttgggaggtcgaggaatgagattgcttgagcccaggagtttgagatcatcctaggcaacaagaacaacaacaaaaaacaattagttgggsatggtggcgcatatctgtaatcccagctactgaggaggctgaggcagaagaatcgcttgkacctgggagttcaaggctgcagtgagctatgatggtgccactgcactccagcatgggtgacagagtgagaccctctctcagaaaaaagaaggaaagaaagagagagagggtgagagagagagagaggaaggaaggaaggagaaaagaaaagaaaagaaaaaaagaaaaagactgaacaaaacttgagaaaagcaatgtacccttatcacagttttatgggaaagtacacaaatgagtaaaatgcaaaataatggcattttctgtactgagaacagagataccacagagcaatcgaggaagaattagttatactgttctctgttggattacaaagcagaattctgaaaagcacacgttgtttgacacgcagtgtgaagttgcttgacgttcactgtgatgttggctgggacactgtgccgggtatgtgtgggtctacagattcatcaaatggcacatggtcagaacgaccttctttttgctaatgtcattaagtgccatctattaaaaatcaggtgcttacaaatgagagtatttaaagaatcagagggagcaaggtattatgtgtccccttgttatcaaactatattatccaaataaggatatgatataatcaagccaattctaaacagtccaaaggcaaaacaaaagaatgtgcccagtgctttcagccagtgtctggatgctaaaaatcagactgactagtcaatgaaagcgaccacaaaattagatgattttgacccaaaagaatgccttggcctcccttcccagagtgtttgccagttttccatgtctgctcttcccctcttcacccccagccccaggtggaaatgaagatggttttccattttgttttgaagagagagcttcatgtcactgatctataatgtgaaggaaaatatcttcatcaaaaccaacattcttaggaatacatagaaaataaaaagactactcatgtcttagaaaagttttcccaaaagttggatcatgtkggataatgttatgatccttttcactttcaaagttccctagttcccttagagaggggaaaattatattactggtagaaatcaacatttccttttctttagtgaaaaaaataacacagcactctttaattgaaacctgtgtatctttgccctccccactttctgcctttgctttttcattcacatttaactcctgcagcaacaataacctctgggctgttctgcattagagagaactcaagagccctggaaattataatttcagaagtattgataatattaaacaacatcaaaaatttttaccacttttgcctgcccttcttacttttttcacaagttaattgaagatggaaggcagtaaagcctcgtgattctttttcaaaaaggttaaaawacaatataatcyatcttttttttttttttttttttttgacacagagtcgtgctcttgttgcccaggctggagtgcaatggcgcaatcttgactcaytacaacctccgcctcccaggctcaagcaattctcctgcctcagcctccaagtagctgggattacaggcgtgcgccaccgcacccagctaagttttgtgtttttagtagagacggggttttaccctgttgccaaggctgatctcaaaactyttgacatcaggtgatccacccacctcgacttcccaaagtgctgggattacaggcgtgagccaccgcgcctggccaaagtaatctatctttaaagatggtctgctatccttaattgtgtatttggtataggttaatagagtgaaagtcctgtaagctataggattagatggacgttgcctgcaattcaattccatctgtagagcagatttcattgtcacattaaacattagaacttaagaaacaagttcttcagagaagtggattgagaaagattgaagtagtattgtgtgagctgagcttgagtcagctattctgttggagaatccctaggttacatcagagaagatagccgtgggctagtcacctctatgagctttgtcatggctataattttcatcaccagtcagtccttcaaatagatatttcttagagatgcatgggtaattagagaaactctcaattcagttattaaatttttcctactcatatccagagttaactgctcatttttagcttgaacaaattagaggattgcttagtgctgaatactwgtctctttgttctataagcttgacagagctttcttattgcctatatgataatgttggaccatcttcaagtgtctacagtctttcctggggctggtatggtgctccagcataaatgcataaatgtgtaatgcagtggaatttcaactcagtgataaaattctctaaaagagagaactaattaattttagagccagaaagaggcctatatccaacctatttatgtatgtgctagagctggttastacagagcaaattagagaccaataaaaagacatggtgatcacttcaaattgaactgtcttaacagaaataaattgcagaagcagataagattttcacaaatcagtgcagtatggccctgttactttttatagcatctggattatggcttagacttattaagaattagaaaaacaaatttcagtgccatcactgatacctcaatataatatgggacaagctgttagacatcaatatgctgaaaaatggccaggcatggtggttcacgcctgtaatcccagcactttgggaggccaaggcaggcagatcacgaggtcaagagatcgtgaccatcctggccaacatggtgaaatctcatctctactaaaaatacaaaaattagctgagcatggtggcacatgcctgtagtcccagctactcgggaggctgaggcaggagaatcacttgaacccaggaggcagaggttgcagtgagccgagattgcaccamtgccctccagcctgatgacagcgagactccatctcaaaaaaaaaaaaaatatatgaaaaggtaacagcaattttcagtgagtaagcatataagtaaaggataaggagagaattgcctcttttctgtcgcattcaaggaacagctggaaaatggaagaaacatagaaggagagaaacatcaagaaatacgtattagtcattccactgtaggaaaagttcattacaggagagtcatgcaggcagacagggtcttcttagtatcaaggactgattttgataatgtgcccacatttcagcgagggcgttttaagacataagcacagcattaaggtgtttcaatagcagacatacctgtctttattgcagtggggagaaagcccaggctcatgaaagaggcgtgagcattcacgggaaggaagaaagaccaaataaaggcctaggaggaggtgagccggggaactgtacaagggagcaaaggccccttcttcagatgagttcaggatggccttagcaccagtgcttggggaagaatggctcacatcctctatggcttaccctcttcttccaaggctaattttggaggctttctagtctttcttttgggatcaaatatatcatgaaattgaaacaataaaaccaccccccatagagctgttacttggttttcacttttcatataatattaaaatctcaggactaggagcgatttccagaagctattaagtctaaccactacctccagacagaacttcacctagatagactaagggaatgtattccttattgaaaatatattccacctcattcatttacaaataaggtgtaaaccttcctggaaaaaaattcacaagtgccattataaatgcttctatggataaagaccttaaagctaacccaaagttattttgccacatatacttaggtgtcttaaataaataatatgcattctctcgattccatccttgtgaatttgcatttgggttcccacttcttcaaaagagagtgtgtttgttccatggccaattagtttgatagtacatataagtaattttgcatggataaaaactaaccatgcaactttaactctgcctttaattaagtaatcattaaaaatgaaacttgtctacttcctcctgttctgtagttgacggtgattgaggggcttggtatggctgtagtggcacaaaaatggaaatcagtaaattagagcagttgtcagacccagattctgattagctaaacagcttgcctgggttagtgattaatgcagttgtagggaatgaaatctgctttcctagaaaagtcaatagagaacgtttaatgaagtagaattatgtgacagttgtccagttgtgtgaaccatctttgaacttagtcaaatgcagatgtaattttatattaagactttaaaagaatggaaaaatggcttcaaacataggagaacaaaattttctgctttctttgtttacttcttattttatgtcaccccataaatgtgattggtacggcttttgagattattggtttagaatttcttaccctttgttgtcytgagccatcttttctctagaaacatgctaatattacagatggttcaaatgttcctataatgtcaatgtgtaaatccatattgagcaatgtagaggtccggctgtgaataggacaaagaaaaaattaagaaaatatttaaatgtacatacctccttttctaggatttaataactcgaattatttataaaatgttattgacaactttattaaaagtataagttacacgttataagattcacacttcaaagtgtacgattcagtgtttttagtaaagtcacaatgttgtacaactcattaccactatctaactccaggatattttcctcattccaaaaacaaacctcatacccattagcagaccccctcccatttcctctttccaccctttccccagctattcaagttattttttaagcagatgttctgattaaaactctgtatctgtctttggtgctttagctagcaaaaaaataatgaatataaaacaattgcctccccatatatattggtatatataatttattagaatgtttttcttttcacttttaatgaaataataatgaaatttcaatatgtataactggtgaaataatttyggcaatactgtgagtgaaatgatagggcaaaaatgaatgcttttatttaactcacaattgatataaacaaaaaaatcaaatgatccagtcaggtcgagggtaaattctcttaaggaaataacaggtaaatacttttccttgagtgtaaagacacttatgtgtatttattaacacatacatagaatttagataagaattatctttaaaaatatgcatccttttaaatttattcaactagtattatcttttcactacaaacacaataaatcctggttttgcttgcctccactagtcgatatcttgagttaatcttgcacatcagctgaaagaatagagttaaagtttgtatctatgaatagaaggacttgataaactatttgataatgtaaataagagtagaaagggaatatgtagtgtattatgctaagatagtatatgtaattcatgtgagtgagcacactgatacattttaagataagcaagtgccagattaatgcatattcttgccctgattccttttcatcccctttcccttcatttcctcccctttcccatcctcttccctttagacccttgtcacactgacctgcattcacttactggaactggctatgtcccctcctgcctctgggtcttcaagcaaggcctctcctctgcatgtcttaacccaatccgcacacctcccacaccatgctggccctttgcttacttaaattaacttatcatccttcaaatttcaactcagtagtacttcccctagaagccttttggaactttccagaagtcgggtcctgttcatgttctcagagcaccctgattttttggaagtaacattcatgcttctatcctcatcttctctattttcaaagaagaatcaaagaatgtatgtatattctaatatatattgtgtaagtatactaatgattcaatatctttttagaaaatctgcaattttggactttttagtaagtcagacatcttttgcttctgagaaatctgaactattttattttgttatgactgtgacattcattccatgtgttgaaatcaagacacaagaatgcaagaaatgacgacttgccagtaaatgcccagttttcactattaaaaaaagcctggcattgctctcccagaagaataacaactcagtgatagaggggcgtaaagaccatggggccagcatatttgaaggtgatttttaaatattaactgttgtggtcttcaatgtgagtaagcctgcatttttcaaaaggtttcatatcttacaaactcctgatttctccctttattaaaatctattttgaagtaggccaagctgtcaactaaagtgaatgttttcaactaaaagatgattcactttctaacttgacaaaaataaatggagaaaattatagattatagatcaattatcactttctaatttatctctatgatttcaccctgatttattccatgaacaatttaaggtattttaactatctgacattcatttagttgaacaaaaagaaaacgtgaaaccttggtaaataagggacccccttaaactgaaactttcctaagtacatttgaaagtccataaactgacaatggataccaagatcatgagatcacaaatgtgacttttccttaagatttcatcacaagataaatcaaagtgctaggaattgtattttcccttttcctagtaatcaagtatccttctcagatgactctttttgtaaaagtaacaacttctcatctttgagacttgactcacataccaaatatcaaaaatggaaaatctttgaattctttktcctgttgtgggaatacgagtcatttataacaacaaaaaaaatcgataggaaatggatgttttagggaagtgtatcctgagtgctgtctttaaggcattgattggagactgcccacatctaaaaaatgactctaggacatcactctcatgtatttccgtgaaaaagctggtggaaaaatgtgttttcttctaaaaggctatgtgtgggacgtgtgtcagtgttcacatgtgcctaataggcatacgtaaaatcacacttgtatgaaaatcaagtaaatctgctgaaataaacagcaacccatgtttggggcatttgtrttggtagagattggcttttaaaggagaatggattaatatatgattctcttgtcggtattactatgaattgttcttttttgaggaggagtctcgccttgtggcccaggctggagtgcagtggtgcagtcttggctaactaccacctcctcctcctgggttcaagcgattctcctgcctcagcctgctgwgtagctgggattacaggcacatacaatccacacccggttaacttttgtatttttagtagagaagggtttcgctctgttggccaggctggtctctaattcctgacctgatctgccttcctcggcctcccaaagtgctgggattacaggtgtgagccaccatgccaggcctgaattttcacttgcaaaattatcagtcagttcttaaaacttgaggaagggaggagtcaagaaaatgaggtgaatgagaaggctgtttagactgtttttattgtcttacagtcccatttttgtctttcactcttccttctctctaatggctgggttttcaacaataatacaggcaagcataaaagttagcaaatgagggctaacctagaattgcaaatttgattgggtttcatgttggttttccttaaataaatcaacagttttaacagggtggcatttaattatatttgtttacagaaatatttttatatttgaatttctttcataacagtgtttattgtggtcaaaggatgggagggatgaggaaataatatttgaagaccacaggggcattcctcacctctgtagtcttattatctggccttgaaacactacgacattctttaactgaatttattaggggctraataccaacaacataagtcagaaaagggtttacattgacccctttggattctaaatattgtaataaatattattagttccgaaatatcatatctgtttgatttcccaaatgattgcagaaawgcttygatctttttagtcctatratattgtagagatatctcactaaygatgttttttttttttttktaagatrgagtctcgctgtgtcgctcaggctrgagtgcartgagccatgtttrtgccactgcactgtagcctgggtgacagagcgagaccctgtctacaaaaaaaaaagaaaagaaaagaaaagaaaaaaagaaatgtaattcactttcttctggtcagcagctgacaggatagaacacattggactagaaacctgttgtattcttacttttacccatgacatggcttcttttagaatacaaactgtttagaactaagacaggaaaatttaacaaagcattagatataaaaatgttcacaacatgtatggtctattctttaatttgagaatattttaagaaaatttgtggttgaaagctattgctgtcattgaggtggtgttacaacacaatcgatctttgaaaaagtattggcttcaccagggaaacactagacctctaccccagtgactcctgctaaagaggtctttgccatcgctgccctttctgatacctttgtgtgtgctcagattggcacactgattaatttcagataccatcagcaaaaatggaatatgctgaacaagcacttacaaagtagtggttcttcatagaacagagttgtagcccttcagtaacaaagaatgagtcagaggaaatgagttaatttaacaaattgctagttgcctaccagatatcatagcaaggaatgatatatgcaaggtgtgttaaaggcaatgtttccttaatttcttctttctatctcccatctcccaatgtcctctggggaggccgtagaggtgggagggacatattwagtaaaaagtgtgaccacttgctgagtaatttttagtgatttgttgagctggattaagtgaatttagagttgaatcttcaaaatgatcatttcctttttttaagagtttatattctggatattttcatttgaagagcagtgatagtatccggctaaggtttactaaattgttcaagtgagtttgcagaagactaagtgaaacaacttctgtataatgaactggaagattaatctgcatatcacataagcaaataaaaaacaagcaatcatatattttataatggaacaaccgtaagataaacaaacaaaaggcatagttaaaaatctgtatgaaaaagcaaattcttggtttcccaagaatccttggtttcccaaggctcaagaattttatgatttgagaaaaatacttaagtgttgcctgcacttctgtgcaataaatctcattatttcatactttattgccactactgtcatgaaattaatggatcacatttaagtattccttcttggaaaaatatcactaaaatgtaatgttcctcaagtcatagtgcaaacaaaattatatttatcatttacagacaggttttattggtcctggtgcattcatctgctgatggccaataaaagctatacaaagtctcatcaatgaaattagtaatctgtggggacaaacatgccattagtgcctgtcattygagatttgtgatcattgacgtgctttttatggcatctgaaaatattagtttgactttaaaaaatgtagagttgtttctattgttggatatatttataaaattctgaacataaaaatgctctttggtagccacttgaatttttaaaactatatttaataaaatacagcttttaggaatagcaatcagcatgggataggtgacaatgaattttttttttttttttttgagacggagtctcgctgtgtcgcccaggctggagtgcagtggcgagatctcgctcactgcaagctccacctcccgggttcacacctttctcctgcctcagcctcccgaatagctgggamtacaggctccagccaccacacccgggtaattttttgtatttttagtagagatggggtttcaccatgttagccaggatggtcttgatctcctgaccttgtgatctgcccgcctcggcctcccaaagtgctgagattacaggcgtgagccaccgcgcccggccaagtgacaatgtattttaagtagcctctgctatccttgacgaaatgtgctaaagtggcaaaatgtttgctttagagatgtacaaaagtagaaaatttgtgaaggacattaggtgtttctccactttgagaggggatctcctcttgatctactctttatttcccatcccagagtgaacaaggtactagttgatgaattcgaatcaggatacttgaaattaagacttagatgtagcactttgtgatctgtaaaaatcatatcagatcttaaatatgaaaatgtttgagtttagccaaaatcaccagcatcattggtgtatatcaagtttaatcctatccttggaataatagaacttcaaggttggaagatgaatcttgaatagtttgaagttaaaccctacctgccgttgcaatgagtcccattgaaaaacatttcctacatgtcctcgacaagtctttgctttctttagttacaaggaattgcccaacctaccaaggcttccccattttatctttgactatttctataaatttctttttaaaaattgtggccatattttaagacacagagggagggtagacacctagatctaaaggatattaatctacttaagaggaatttgcttatggaaagatgatctagcaaatgagataaactggactgataaaaattatccaaactcaggtttagatgcctatagcagtttcacaaaaactaaatctttgtctctaatggatctgagctgatagcagtgtagtagagaccaaaggtctgtgactgtcgtggagaagccccttttggatgaagctttacggaggattttcaaatgttaattatatttacaaacagatcagatgtaggcatagatatattagaatactttatatcttctctcatttatttttctactgctagataaatgggacttataagtagctgagtaggcaaacaagaaagaatgcatacagttttatcartttatctgagattttgtgataagctacagaccaagtcaaatggactagttttggcaggggcttgctgtccatatgatggtcagttagcttttttctgagttaaacttgaaaactaagaactttaagaagtgcatgggtatatataggtgtgtgtgtgtgtgtgtgtttgtgtgtmattttacaagactgtagaattataaaatgacatttgttttaaggaatatttgattgacagtttcacttaccaacgttagcctctaattatgacactgaggatacccaaatttaaaaatttcctttataatggtccctgagacctggtgattgaggtcataaaaaaggaatggtagttttctttcagaattttaaattttctcaaataatatttcaccaaatattagccacacttgtatactttgactctgttggtcgttaaaatgtatagtcataattamtcctatggaatagggatttcaatagaaagaaagctttagaaatgaatcttctttgcagataaatgctatttaattttcagagttaatataattcaaattatttagaagtttacaagattctattataaagccagtttatttatttttttaattccattatcatctgaatattctaaaaaatgtaaaaagaaatctatttgtagagaaaacaatgccttttaaagaaaaatgtattttgtgctgggctgcagtcttattcatcacttgataaatgatgcttttaattcagataattagagtaatttgtaacaaattattagatatagcagacttgccattccatttctataaaataaaaatacattgtaatgtttacattgatgagtaataataacaacaccttagtagttgtaacaatatatgacctaaaatcagtggtaataatgtcctatgataagaagattgtacaaacttaaaagctagattttctttcaaatcttttgtcatactcctgagagaaagatatgaggggaaaaaagtcactatagcaaaatgccttctcagaactgtttcagagcaattgaggggagaaggaaagaatcagtcagagattgtttcaaatttaatatgaaataaactgttacctttaactattcagcaatgacacagttatatttcattccaaaggtgtttacaatcatatgagtgggtttctgtattcaatgttacaataagtcaacttggaatttcccattaaatatgatattaataaaagatttaggtacagtcccctggtgtgtttgaagctgtgcactctgcaaacacataaataaaaatatatctaattggtttgtggcattttgagattttttttttcagaaggaatgtacttaaaaaaattaaattactgcagttttctttcagaaaattgggcttttgtattaaataatgctagtccaaacttaaaaataagaatatttaagcctggtaagcatctttgttctctcaataaaaagaaaaaaattagagactctctttctccctggcctcatacccccatcatcttctgaagttatatgtatatgaagtattttttttaatctacagggataccttttaaataaaatattcctttattatcataaataatctgtaaaacaaaataatagtggcagtatttgtaataaagtcctaaaagttaaatcatccttattatacttaacataatccaaaagactcctaattaagttttcctttcctaacttatattatcttatgatgatctacaataattttgatgatgttctcaaatgttcttatatctgcttctgaaatagttaaacagattattgaaaaagacctctgaaacaaagcaaataaaataatgcatagaaggaaacagcttttagtcttatctctaatggaatcatgttattgagttttctaaattatggaagatgtcaaaggtcatttagagctagacttcatgtgaagaattcttaacttgaattggcttcagaaaaagaggtccatgaaactccaaaattgtatgcttggtttttatttgtacatgtaaacaaaaattgatagctttccccaaattctgaaaggagtccttagctctcaaaatactgagaacctccattgaataagacatttgagtagggactttgtggtcagagatctgagtttgaatcccagctctgctattttccacctgtagggtcttggcaaactcctaatctgtctgagatattgtttactttctaataagtgcaggtaaataatacagaatttacaggttattgtgagagcctatgagatcatgtgtatttttgccctggcatgttgaagtcacacaataattctttcctttctctcggtttctctcttttaagatgacaggaatggttagctaaagcaactgagtgttaacatgagggttcctgctctattgcttgttatcacacatgggtacatataacagtgactgcctataggaagaagtcattaccccgggacagctttcactggtggatttttatgatggaaagcaaccgcattaactgcaatatggcccagggtgacacttgacatctgtatgttttatttttattaaaaaagtaatttaaattattgccttttctttttattatggaagaaaatgtaagaatgttgactgttcactaagccgaagattccctttttgctttcaaagcttttctcaaggacattaaacactcttcctaattactttttattgatttcttgacatttctactcaacattgactgcttatttttaggaaacaaagaagcctaagtgaaaaatgttaatggtgcatttgaaactacaaarttcaatattttagtcacgcctcttatatgtaattgtaggtaaaaactatataatatttttgccatgtgcctcagctctcttatcaccgaagtaaatagaaaattctgtgattctcagatttcttccatagctttaacttattttgaacaaatctgtgacttaccttgctatatttcaaattttattttattattattcatttttatttttatttttttgaaacagggcctcactccattgccccagctggagtacagtggcatgaactacagcctcaatttcctgggctcaaatgatcctcccacctcagcctctcaagtggctgggamtatgggcccataccaccatgcccggctaatttttaaattgttttatttgtagagatggggtctggtactactatgttgcccaggctggtctcgaactcctaggctcaagcaatcctcctgcctcagcctcccaaagtgctgggataataggtgtgagccaatgagcctggcatattttattatatatatattttttgtctcaagaggttctgagaacatgtgtgcctgtatttcaaattttaaatgagtgaagataaggcttggcatagtcaattgaataaaatttagtaaaaaatcaacggaatactgaagagactgatgaaaattacacaaattaactcacattttacattgttcttccaattttgcagttatttgccattagtaaacactttaaatatgtctgccactctgatttttagcattatttttgttaggagtaactatgtaaagcaagtctgattagatgatcctcatatgtaatttaaccaaacgaaagatgtcttatgttaactatttagaacagcccatttatttaaatgttgctcatttaaattacttgacagtcaggaattaacttttaattaaggagtgctaccatcagacctatttttaagagttttcttgtgtgtgatttgcatgttatatacaaatgaggttaaagaaaattacaagtcaacaaaatgaacctaacatcaaatgtccctggagataatttttttattttatgtaatttatctgcatctcttatagaaatactttttttgtcttttctccctatctctttgttgtgtacaatcagcttttaaaggatccagtggtattaattttgcattgcggtcaatcagagatcttatgcaaatattaaatattgcacaggcatcataactaaatttagcrtttcatttggaatagttccttgtgccataactccctgatggtgtttataactcagcatatttatatttgtatgtgcatttttatgtatatgcatttctctttggtctcataaaaaagtaaagtgtgtatttttttctaactctacagtcattactaaatgaaaattaagttgtttttaaggcatattttttaaaaggaaaatgatgttaatctgaatgaaggttaaatagaatcccttataacactctggcactatgtggtcacatcattgaatttctgataactttcatattatactttagtctaactactcaagatcagtttagttttctagtgtttaggaaagcttaatgaaaaatataagacaacagacaactagaaaactagacagataaactgaaacagacaacagaaaactagataatatagacagagcgttttccgtgaatgaaaactaaaatgcatcagtttgactcacagtggcctcctgccttctgctaagtatgcacaacctaaaggtaatattttaagtctcattctctgacaatgtagtttgcaaacatagagaaatattcagatgtagaagaatatggcttctctaatggccttgtttgtttttagctacaaggtgacatatatagttctggaatgaaagaggcgtcatcgggcagaatatttcagtggctgtattatgggcctagcaagtaacctgccttggaattcctctttattattttgagaacaaaggcatgccatttaacttttttcagcctcagttttttttttttttttccaactgtgagaaagagaaagtgtcacctatttcttgttaaggactaaaggtgttaaaatgctagaatgtctggcacatagtagatatttaatgaatgtcagtttatcttgtcttagctaagaattttcatgctttactatacagataactcttggattttatctgcattcatttcttctccaaaaaaagggaaccaggaagaagagaagcaaaagacataactttacaatgcctagctaacattatcaatgccaaacacctactggtcgtggtaaaaatgatttctacttcaaaagacaagattgctgtaaaaaatcattgctacactatgaagttatgctgtaatgttacgctatgaatttgttgtgctataaagaggaaagaagatgtttaagaacaaaacatgctatccagagcacacctccatttttgcaattacaaaatgtcttctttctttgcttctcatttctccagttcctccctcgtgacctaccttgaagatcacctataagcagaacatgataaatagcatgcccagtagaaatggtagttgtgagcacatttaaagtgctctgtgatgttttactctcagctgtattgaaatatagttggtgatgactcattctagaaatatgactattaagaatgagtacatttatttcttcaataataagaaaaccaacagaatggtaatcccagaatcttagttctacttttaacatttcacacccagtaagttggataacggatggcagagtgagcctgcgtaggtaataacttattattattacccttaccgtacatggcccttttccttgtacttttctccttgagccaataatgactttgatggttcagtctttctgcactttgtagaaaccatatcccaaacagtattttctagacatcarttctagcatgtgaaagaatctagacagcctctccgattttcatgcttctgggacagaaaagtatttatcacaggtaatgatgataatccagttaaatttgttatgcctttccttactttcaaagttaatttccatttttccattttggatgctgtgttttatggaaattgtctgtaaagagtctactagccttacatgtaatggtcagcagacatatttgatacctttctttttcctttagtaaaaggagttgtaagtaaggagcaagtgaaaagtgaaggggaatttagtatgtctcctatttggcagcaactgcgcatgctattcaatctttaaataatttttaaggaacttgtctcttattgtaaattatgtctggagaattagaagtgctacacataaaaattctgtctttggaatcagtacagatccatgttaacctcgttaaaatgatgacttctcatctaacttcaaatattcatttttaccttattaagtcatagagtttagctaagcactgagggtatgtcctytttgttattttgattctgaaatcctcctgatggtttttagggtagttatggttaagattttggtgccacgcctgatatttcctaccattactgtggtagtgatggatttcttctgtctggacctccgcttctagtggttctctgatctaagcatggttggaactttgtactgacctcatactatgcctagtcacagagcttgtaaaatacagccaaaattttattaattcagctatatctcttatctctagaattggatcatccatggctcctctgtcagagttgtgaaaatggtcagctttgttacgttgagcctgaagcactgatcccacaaatcaaaagaccacgtgactcaattcctagctcagtcatcttttctctttcgacctttgtgtatatacttagtgtacctgtctctcgaaagtgattccagcaacatagattacataccccacttaacagattaaatttcattagacttatcaacgaagatcctttgttgccatattgctgctatgatagtcctatataggaaactccagcttcccatcaggatttgaagctagactttaccataaattgcaacagctgccagcctgttgacccaagaaatgtggtgcattcaaaaagaaggaacaaactcagacaagtaaccagctctgtacatcaaaaatccttccggtttcggtaaactatcctgtgactatctaactttagtccctgaagggtattacgccttatttaccttacaaaactggcatcctagaccttcctaattgagttgaacttcaaattcattgtctaaatcctaagaaatgttgaattttcacaaaccccatttcctgcctgctctctccttttctcccatacatccaccatcagatttttttttgtttactttctctctgataattcatgagtaagtttaaaaaaaaaaaaatgtgtggccagagttttctgttttctgtaratattgctgtgggtttgcccatgcctagttccaacttttaaataaatatatataataatatatttatgttataaatatataatatatttgttataaatatattatatatttatataattaaaatcttatatgtaattataacataaatatatatgatattatatacatatatatatttctttttttttgagatggaatctcgctctgtcaccctggctggagtgcagcggtgcgatctcagctcactgcaacttctgcttctagggttcaagcaattytcctgcctcagcctccccagtagctgggattacaggcacacaccaccatgcccagctaatttttgtatttttggtagagacggggtttcaccatgttgagcaagcttgtctcaaactcctgacctcaagtgatctgccgacctcggcctcccaaagtgctgggattacaagtgtgagcccctccacccaaccgaaaagaaatattttgatgctatgaatgcatttgtcatttctattctgtttcatccatgtgttcttcttgtttacctttgtagtagtcatttacagtgaaaataattgacaaatgacatggtgttatgttcttgaaaacaaacatacaaacaaaaacaaaaaatgaaagcagacaaatgamcaaaatggccaagtaggtgtttaaaggcttaaattgagcaaagaataaaatggtattttttaaatgttaaagaatgatgatgtgttttaatagtattgttaactattgaatcaatttatgtttagtctgcttaaaattatattttggattcaagatggactactgctatcaattgattagattgaaaacaagcaagcaagaatctagacracacaaatgggggaaaaaataatgagatgtattggacactttcctggctgtaggaaaagagctttgataaaaggagtgatgagatataattaagcacaaagtaacctacatgcttatttatcagtgaatctttcagttccagatcatttcttctacaaaaaactaaagaataaaaatcagtctttcagtcactgggtgacaggatgcactttgatttttccaggaaaggaaagccaggatcacaggcatgcgcatgcacacacacacaaacacacacatgcacactcacacatacacacacaagctcaagcgcgtgcacgcacagtactttggcaagtagagtgttagctccccaagcatgagcttcaggccagactcagtggctgtgatagacccatgcagccatttgacagattttgataacctttttattcaaagcagcatgaagggccaatgaaggattgctgatttttttttaagacaggatcttgctctgttgcccaggctggagtgtagtggcacaaacatggctcactttaactttgaactcctggacctcagtttcccaagtagctgggaccacaggcacgcaccaccatgctcagctaatttttaaaattgttgtaaagacagggcctcaccatgttgcccaggctggttgaamtcctgtgctyttgccatccacccgcctcagcctctgaaagtgctgggattacacgtgtgaacaactacacccaactggattgctgaatttttataacatgtctctggtaactaagatcctttgaactatgaccattgaattcctaggacttgtgtgatctcagtagagcaatgactcacttccctcaggttttcagacttagaggaaaatccaaggatcagtctgtagtataatgctaggcatgaaaggcatgaggaaatgatgggagcctccagacagaaaaggtmtcccactggtgactgatttctattcagagacaatgccatccctgtgattgaagctccaacacactgaaaaggtgtgaaaccaagaaaagtctctctttcaataaaagttttccatatttcaaaaattttcagaagtaaggatttcttaagggaaaagccatgaataaatcaggccctttttttttttttttgagacagagtcttgctctgtcgcccaggctggagtgcaatgatgtgatcttggctcactacagcctccgcctccctggttcaagtgattctcctgcctcagcctcctgagtagctgagtagcctcctgaggcgtgtgccaccacacccatctaatttttgtatttttagtagagatggggttttgcaatattggtcaggctggtyttgaaytccgaaccttgtgatctgcctgccttggcctcccaaagtgctgggattacaggcgtgagccatcgtgcctggcctaaaccaggcctttttaaagaataggatcagaggtctggtttcttcttcttagcaaggtcttgttttcctggtaaggccttgttttctgcttagaggcatcactacaaccagcctgtcatctgtgaactcttcccttggtgggattcagaagtgtagctcctgcatatgtctctccattatgggagtcactggattctgtggttatttaattagaacatgcctcactaggtgttggctacacctatttgagctgaactagaaatgcaaattcctgctacacrtattttgcattacaaagtgttctactttttgaaagcttttgagtaaatggcaaatctcaactgaagactttgactcttctacaggaactgcatggaaatgtgaggaaccgaattggaagaatgaacacagcctaccatttggttttcaatgctttgatttttaggtggctttgtagtaatggatggaaagaacaaagatctgtattaaacacatgcttgcagcgtctacaaaaatggtttatgttttaaaagaagcrggggaagacctcagtcattctgagttattacagctccaggagatggaagtgttttattagcccatatatatatagatagatacagtgctaccaggaaaaaactaatgaattataactaaggtcctwtgtatggaccttaatattccttgtgtctgacgatgcaggaatttagccaggcaagctgagataaggccctaacctttgctctacttttctttttatgatcttyttccacatgcccttttttggtttaaatataaccaagatgatttccattagatttttctaacaactgcatgatgtgtgtgcgtgcgtgtgtgcatgtgtgtgtgtgcatgtgcgtgtgtgtgtgtgtgtgtgtgcatagcagcaaagccagatgatgatagcaggatgcagaaccccaattttttttaatattatgtaatgtagaaaaggagtgtgcacacctgtttgcttccttcccattgaacaacattaggttgaaagccaacagtagaaaaacaggtgcttgttatgtttgagtgtggagccccaaaaatggaaaaagaagaaaaagaaaaagcaccgggttttagggaaggcttctttaggcataatgtaaagttaatttatcattttggccctgttccactaaagacacagaatttgcrgcaatactacctccccatggcctatttctctgaactaaaatgtacattttctttagagaagcaagaactattatgaccagctagtcctggttttgggtggcgggggtggcaagaaaaaaaaggaaatcgttttctttaagtaaagcacttaaaattatatgtttttttgaaactggttttattcctgttcagattggtcatgagtgaaatgacgtagagtactttaaaaagttagattttcatgtgttatttggttaccatagaatttgtactggaaacctaacagcagatatacatttaataacacaatgtattacagggagacatgttttgctactctgatcgtgaacttgggaacaaggaactcctgggagttgtgggaaaatatatggactgaaattagccaagtgttatggagcaagattcatatgctcaaacctacttttactgcttcgttgctttccgtgcagcaatttctggcctcagtgaggaaaatgttgtgtttgtggaaacataaactggctatttatgtccacaaccatcacacaaacacagaactgcagtgatttggctaaatggtatatagcaacgtgcagtctggggttttagagaggcgtgtttcaagctgcatgggcgacattctaaggaatattaggctttttacctgcaaagccactgttcaaagaggcctggctcaaacccgaaacacttggaagattgtgtctaaatcctagaacccactttttgctacacttttagggaggctccttgcctcaaagtactgaaagtttagattgtttaaaacatttgtcagaaatcatttcctgggagtgaagatgcttctataactcataggcacatcactgccttcatcatctctgtaaaaaacatatcatttcaagccaactatggtattgtccatcttaatgggatcctttatatcaacagacacgtagtctagtgagattaggaaagcacagtgacagctttacctgtaacagacgttttagtgttaccggtgagtattgcatattgagaatgggcctcagttcctctgttaacatgatgagtgtttcctagattgcgtgaagagtaatgagaaaatgtgtgataagcagtttgaatgcctttgaaagaggtgtagtacaaggtgtgaaatacaaaggaactccagcagttagctcttctcaaattttcatgtatataaatataaagtagtgtcatttcctgaatatgatccctattctttttccatcattttcttgcaaacactgttatcctcaaaccctcttctactctcacctccttcactagtctcatctccatgttttcccgttccaaaggctgcaggagagaccattagtttcattaattatggccctactcaaaagcctaactctcttcatggcctacatattaaacattaattccaaccagattatcaatggcttctctggtatggttgcattattattttatagcttcattaacttcacctccttatttataatccatgtcctagtcaaattgaactgctgcctctcaccaccaaacatgacatttactttcttacctccgcatttatttgttttttccctttagtggaatgccatcttctcccacaaccataggccaaattcaccttcttaatatatgactcttttaatatagttcccattctcacatttattgttaaattcatgcctgactgacctaactgattgatattttctgttgctgctgtgaatatgatcacattatttcactgggttttcttgatggttactactggtatccaaccatatcatctccagatcgtgattattttatcttctcatcttctaaagctgtatcataatttttttattcctgccttactgcattgattagaacttttaagagcaatgctgaatagtagcactgatagtcaatatcctttacttgtgtttgacagtcatggaaatctcccctagagtttcactgttaaggatcatttagattattagctaaaagcagatattcttagtgatacagaatatcattctagttttacaatataaagacatgttttgaaaaacctaaaatcattatatttttgcatttttaaattttaaatataaatataagcatatatttaaacaagtacatatataatatccatttaaacatgcatattaaaaacctgaaaatacaarggattgtgtaatgaatctccatgtagccatcacccacttcagccgttatcagttttgtttcatcttcatcccagtcatttcccttctctcttactattttatagcaaatcccagacatcttatcatttaatgtataaatatttcagtatgtatctctaaaagataaggactcttctatttttaaatatatccataacatgtttgacacacataaaaattaatgataaccccttaatattattattcattatctaatccatgatcagatttcctacatttgtaactgtttgaatcaggatctgaataaaattcacaaccattttgattggttgctatatttcctaatgctattttaagtgttgatattcgaatttttctccttttttcactctttgtttgattctagccctagctccctttgtctcttttttctacgtttaacttttttttaaagaaaccaggttgtttgtcctgtaaagttctctgggttttattgcatcccctcttgatgccacttaatttagtccctgttggttacatgtatgtggatgtttgattaaattcaggtttgatttttaaagataatactgaatagttttacaaaaaytgactttctaatttcatcaaaggttgattcggtatccattgaaatgaccatatgacttttatttgttgatgtgccatgatgtttttttttaaatttgttgaataagataatgaatttaccttatgatttctctcttttgacctttcagctactttcatttctaagtgggctttagttggtgaataaattaacatgtcattaaatgtcacatggtaatttcagtagcttgttgaataactgaatccttgattcttgttggatgttcagtcctctttgttttgatttgttttgcttggtacgaaagatttgactagtttggaaagtgacaggttaacattttctacattgacttgaccttcttccacccaaaatgatcctggtagaaaatgcagagtatagtaaagaatgtgtgccttccacatttagcctggtraggtctataaatatatcaaattaagccagtcagatggcctgctgatatttgctttgcaggctagacggattgtactcctttagaatctaagtattgatggaaaaagattcaagggacagcttgaaagtttgtggactccggctatggaaattttatactcatataaaactgtcagtgattagtagaaaatatgtagcagaactgtgtttctggaattggcttctcagctaagaaaagattattggctttgtgaagaagaaaatgtagctttcttgtaactccatttagtcaattatccactatgggaagatacttttcttcttctttggaaaagctatgacatcctccatggtattcgtatcattgagatgtttctcctgagaaatagtagacttaggatgattagactgtgccatgagtaaaatgcactgtctgaaaaaaacagaaaaaaaacagcaacttgtaggtttgaaaaataacctttcctggcaatcttattattctaaggataacactgtctaatgacaccaaatcatttgctcagccactgctgggaacttagaatctgctttctgtttagctacaaatgagatcagtgttacaacaaaaattataattttgttttatcaggagaaacacccaaaggtcacttttcattctgctgaataggaagaaatgatatcagggtctgcccagaaagcttgtaagggagaaaggaatcttacccacttaggaagcattttctaattcacttatgtgaccttgggcagccttcccctgtgcacttttgtgaattcttagctagaggtattttaytaaagactgcagaactattcttttgagatgatctgtatcctcctttaaaatataggataaactataaaatgtgctaagatccttgatagtcctatcattctatatatgtttgaacaatgccaaagcccaagttcatcagttaaaccagttaatctccattggcccttggtgtcaacttgttctttggacaaagtgtcaccttgtaggaagtctacaaacctctaagtgctcccagcgtattagctaagtcctgagctccatggagttggatgccctaattctgctttagaaagtcctrgttccattaaccgtctcctgagaattctcctggcttccctttttgtttcttgagcagagttcagtcaaggagaggtcaagagagatgatacattacttccagtcactgtattggctctgggaacctccaactctatgcaggttctttgatctcctctggccactttctttctttttcaagtacatatttgctattcagcaaaggattgaatgacttctcaggaaaaaatgccaacccagaatgacaaggcttccgtggttctgagcctggctctgaacctttcctttggaaaactaatgactccacctatcattcccttggcatctagagaagctacattaggtggcacagctctttctgctcagcttctgctccagagcttcatcttcaggaaccacctaagcatttttttccccagtaggagttcagtctgctcattatacctaattgcaaaggagctatattcagagcaagaataataatttcagattttttaactggacttcaaagagcaggaaagtatgcagattcctaaacacataagcattgaagatattacaggtaaggttaaaaaaaatctgtaattttgtagtgactagcagtttaatattcaaacatttaaaatgtgcatattttattaagcmaatggcgtagagttatttggtttaattttctgtaagtaactcgtaaagaattgtcctaaaagctgtgggtgaggactaattcattcaagggaaacaggatctaatgattgcyttgtgaggtatatatacactgtatactcatgctaattcctgctaattgtcaaagaagaatagtggctttttatcagcagtttgcatttgtgtaatggtcctggtctactggttttgtctacttcactgataaggaaaacaccacttaaaacaagcaagaaaagcaagccatcctttacagtattattttctttttagcctgtcttgagaagaaaaaaacctagccttctacaggaaatactgtttgattccatgggaaaatatttagtaacaagcagagaacacttgattatttctcagctatttattctgagtatttacaaaatgggcaatagtattatttccaaaatcttaagttgtaaacgaagtttatattacagtctacatgctatggatatgacactattttaaaatattttatactttaaaaaattgttataacacataatacataatattgtaagtaagtttaattcttgtaatttggaaattcagtcagaaatattaaagaattatgtagatcttgaaagggtaaaataatcctgcatttatgatattaatttctcttaaattgttcaattttattttataaggaaattaagtggttatacatttttgacaagtagttttgataaagttaaacacagattattgatatttacttaatgctttataatcactcaatgattgtcactccaaattaggccatcttttttcacattttgcagaagaataatttcctaagaaacaactattgaggcttggttatatatgtaacatttcagtctgggcagaatttctttttttacttttgtttgctcaatatttatgtcattagtaatagtaacagtatcatatatttgtgtgcagtgttgcaactgacaaagtgttttaataaacttggcaacaaccctttggtatctcatttttgcagctgaattttctaagacaggtagatagagagaagtcccacagctaataattggaaaattgtgccttggacctgattcttcccagccaacttcagtgttcatttcagtacattttatctatgaagggtttcttctagggagagttggtcatggtcttacaatttttaaccccagtgattttggttgttatcattatgtcttgcacataataaacagtcactaaagaattgtgggtcaggcgtggtggctcacgcctgtaatcccagcaatttgggaggctgaggtgggtggatcacgaggccaagagatggaaaccatcctggccaacatggtgaaaccccctctctactaaaatgccaaaaaaaaaaattagccgggtgtggtggcgcatggctgtagtaccagctagctactcaggaggctgaggcaggagaattgcttgaacctgggaggcagaggttgcagtgagccaagtttgtgccactgcactccagcctggcaacagagctagactccatctcaaaaaaaaaaaaaaaaaaaaaaaaaaaaaacaattgtggaaggaggtgaggaaggaaggacggaaataaggaaggagggaaagaaggaaggaaggaaagaaagaagggagggaggggcaggctgaaaggaagaaagaagaagggcatgaaggaaggagggaktccttttgtgtggtaaaggatttttggaacctctaaatgataatagtagtcccccagttctcagctatttcagagaactgtccagcttccccagcaatgatcatttgtcctgaccttttttgccaaggcaaaccaggtctagagtaaaatactacaaaatacattctctggtattaaaaaggaatggccaaaaccgtaattacttttgcaccaacctaatagtaagtttctgctttaccttatactttcttccttataatactgtagttgttgacataccaaggaaagtgtgtttgggataaagtggtcacataaatggcaaacatcaaagtaatgtcagattttgtagtgtttctaattgctgttcattttgtagtcactagaagacaacttacaaattgtgaaaaactagtcataaatcagagggagacaaggtttagtgagatccagttcacctccttcctggaacaactattggggggtatcatcttttatatattgaaacatattttatcttccaaatctttagtttacctttaatacaactcctcccagcccccccagaaagaatgctgtttgctctgattggcataggaccggctttgtcggtttcattacatcctggttgaattaccaaatggaaactgatttaggaatactgagtgtgtacggcacagagaaaaaatatcactgcgaaatttataggcctgtgtaagactgtcagggccctgtgttcaaataaagagagcaaaaggaaacctggcgaaaatcaccatctccatcccggcttcttccgacaattacaacttattcctgtgcttggctgctggtttggagcagctgcatccactcaggtaacacttcgcatcacctgggagctcattgttgccttacaattcgtgatcattttttgatctcactactgctaaaggataaaagtgctaagcataataatccataactgtatgagatacttgctacttcatttccctccaagaatcattttgctatgaaatatcccattactagtttcaggtaatgatctaagaattttttaaatgactatgtcagagctaggggcttcaggatagcattacaaggataatcatttcagagagttatatttttaaggccttttaaaaagagggttgtttctagtttttaacatatttgttaatcttattttgatgatctcataaaatcagagtctaaggaagagatgtgtctatgtgttgcttatgtcactgcttttttttattgtttacattttataaggagtgtctacatttgggggggagttggaatgttggttttgttgtttttagcaaaagccttggcatttgtcctgagagagctcatgcagtgtttgctgttcaggttgcatgaagggcaatctttagcaacctgtcagagatgcaaaggccactagggtctgcttgaggttcagagttcctctgcaggactgcgtggtgacagcacaccacaggtggcccattcagcactgtcatctgggacagcaaggataccctgctccatttgtcatcctatggaattctgtcagcagttgaaagcctttcagcacaaaacctttaacattcgaggcaaacttcctaattttttttttttttttttttttttttttgaracagagtttctctctgtcacccaggcttsagtgcggcagtgcaatctcggctcactgcaaccaccacctcccaggttcaagcgattctcctgcctcaacctcctgagtagttgggattacaggggcacgccaccatgcttagctaatttttgtatttttagtaragacggggtttcaccatgttggtcaggctggtcgcaaactcctgacctcatgatcctcccatctcggcctcccaaagtgctgggattacaggcgtgatccaccgtacccagcccatttcctgatatttttaaaggcaattgccgtggatgaaaatattaatacatagcacctaaataagtagttttttacatgaaaggatattatgttaagattatatgctgtgtgatatatagaaatgttgtatactccatgattttacagaccaaacaatgcaaatcatgtttcccctcttcttaatgaagatgttaaagtataactgataattgatggtaaaaatcacctgtctactcattctttcttattccttttgtttagtttgtttgctttgtaagcctggaaaagatgccttgaaatgtattttgaaaatagctttttgttggagtaataaaaaattagtccaattcttatttatccatagtaatgattccagaataacatgcacatccttaggaataaagttctcctttaaaaaaataaataaatagcatacatctttgaagtccccagatttccattgtcaagatttttctctyttatacatacccaaattaagagccttccctgcttgcccattaatatttgctattattcattgaatgccaatttttttttgccaattcctttatctagattatttataacctctacagaattctgtaagagtgccattacccctcttttcttaatgggaatattgagcatctgagtggttaaatgacttattcaaagccagtaggagacaagacttgaaccacatctgtctccaaatccaagttgttttgagtgtcttttgctgttattcgaaaaagccatgctgagatcaatgaaaggggtccaaaaacatgccttagacaggataataagaggtaagcaaggccatgagtaattcagaaatggaataatcagatattgagtattccagtcagatagaataaaaatcaagcaggggagaagacaaaattaggttatgtgtcacaacaaaatgtagactttcgaaggaaatgaacaggaaaggcagaagaaaatggaaaagtaatacatggcaggtcaaataaaagtaaacaaggtcatatgaaactcacatgcaaataataaagtagaaactagtaaggaagacagaaaggaattaaaaaggaattaaaaattcataagaatgttatcagtagacaagacaaaaaattgcctctaaagatggatttttttttttttcctaaaagagtatatagaatctgtactggcttgatatactggttttgcttttcatcctgaaaatatcattgataaacattgtgtatattagactatttttggttgggactgagtattgcccatggtgttcccaatgatatgagaagaaacatcctggtactaaatgccctggtggcctggggctgaragctttggctttgtataattcatgcacccactttcatgtaacatgaagtttgacaagtgaatattaagttcattatatgaaggtgttgcaaaccaaacttgaaacttatttctacctctcattctaaatggagatattttgtagtgctttagtctacatttacagtgatattagactctttccatttccttaaaagtatgatggcgtttggacattcaaccatgttcctctaagaaattagagtagaaaagaaatttagaagagaatggcttctaatctgcatgttgatatgtatctgactaataatctataatgttttcatttggaacaaataagccaacttgtgtttctttttcaatatatacatcatgtctaaaaaatgtaaagtcaataggcatgtaaaacatttcaaaaataaataattttatcaattgattgccattaaaaatagatgtctaaattgagctgcactgacatgactttataccattaccttgaaccttcctgagaaatgtattttgcttaatgacaatagagcttctcttttccaactacctggaagataaaatattggttaaaaaatgttgagcctcttttcctatttagttatagtaaaattagttaactctataattctctcttttataatttgattctatgtagtgagaccacaaacagcttaacttctctgctattgtttgtaaggtctgcaagtttagtgaaatctgtaccttatatgaactcttccttttaggataatttaagattaaaggctgcttagaagggggaaaaaaagtccatgttaacctttctcctttctctcctcttcagctacatctacatccaccactgggacaagccatcttgtaaaatgtgcggagaaggagaaaactttctgtgtgaatggaggggagtgcttcatggtgaaagacctttcaaacccctcgagatacttgtgcaagtaagaaaagaaatcctgtgtgtcgcttatgtctataactccttgtttcagatgattctatgtctcatgatgtattgttgctttttttccaattttgttgcatcatgttgaataatgctgttttatatgtagagtgttttaaaacattcacaccattcgtcatcactcctctgtcatatgcagaattgttttttgctcttttcaatgtgtgtgaggtgttttttgtttttgtttttgttttttgccatgttatttatagtgttgctttccttgtggtttttcttgttgttattcagaaaagatgtgcagatatcacagaggcctataacttttggtatctacttctacatccaatgtatgaattaagctgtaagataatgttgctttcttatcccagtgatcacctgccaaatgaataagacaacaaagagaagcagaagggcagaagattatttactgacatatatctattacacttgggattgtcttactgttgcataactattttttaaacggagtttagttttatattgctagtaaaaaaagagaaaaaagtaaattgcatatatttggaaatacattgtatgtagcatccctgtgggtgacagcagtgttctttcatttgtctatagatatatctagaatagcactgtctttccaatgacctgaaggagttgatgcaccattaagaagtatccaatttaggcctgggcacagtggctcacgcctgtaatcccagcactttgggaggccgaggcgggcagatcacgaggtcaggagattgagaccatcctggctaacacygtgaaaccccgtctctactaaaaatgcaaaaaaaaattagctgggcgtggtggcacacgcctgtagtcccagctactcgggaggctgaggcaggagaatggcgtgaacctgggaggtggagcttgcagtgagccgagattgcaccactgcactccagcctgggtgacagagcgagactccgtcccaaaaaataaaaaaaataataaaaataaagaagtatccaatttattctctctcaacaggcagcgtaagatagtgatagtatcagtacattaaatatttaaaccttgtagtaaaaactaataggactcattaaaaagtatgtttattttgccatgcattttaagtttactgttgatatttagtctacatatggtatatggacttaaaatttgatgtgggcataaaaatatatttaatattttattgaaatgatgaaaatacacctttgttttcctctttaccaacagctatatcccaaaagcaaggtattttaaaagtcgttccttaaaaaatgtaatgtagaacatctaataaattttgccagcagtccccagcgaaaacatgcagtggggacattattctaaagcagcaatgcttgttctaaaggagggaaaaccattttgtcacaaaaactgttttctgctagaatattggcgtgtgacttaaatcttgacaaggaagaacaagtctgttagagaggcaattgaactgataggagcaattagcaaaatgaaaaaggcaccagaaatagtcaacaaagccatgtcccttttacatcacagaaatactatataaatatttaggtgccaattctaataaaatcttaattatatttataagtaaggaagtgcatcttaaaaaacatatgttttaaagacaaaaaaagcaacgatcgaaaatgccattttgtaggccatgttttgctgctctctgarctgtggtagattgggcgtgtctgtagcgtgcctgatgggacctcatggctctgaacaagcaccttccagaacttctcctttgttgcactctaaagctcttctttgaaaaaagtagatacagtgccaagacaagtgttggtggttgtatagctgattttatcaaagacagacaatttgtaaaagtaaatgtaatctgttagagtgaataaaagacttagagccagaacagtaaaattctaatctcaattactaaacatctctttcacggaaataaataatttttataagccaaagtgaaatgataggtaaaagtcttgcaaaaaatattaaagcaagatgaaatacgagtatgaggccaggtgcatgcctgtaatctcaacactttaagaggccgaggcagacggatctcttgagcccaggagttggagaccaacctggacaatgtagcaaaacaccattgctacaaaaaatacagaaaaataattagccgggcatggtggcatgcacctgtagtcccaactattcgggaggctaaggtggggggatcacttgagcccggaaggttgagcctgcagtgagccaagatcatgccactgcagtccagcctgggtgacagagtaaggctgtcaaaataaataaataaatagaataaaaaattaaaaaaagagtatgtagaaaagatcattccttttagatctgaattatctcatacgactatgtttattgtttaaaaaataatcttagagattcacttcttggtcactaaaatattcaaatctatatgcttgcagcagaataaaaatctgtctgatttagtctttagttctgctgacttgctgtgaatacagcacaaatatgagacatccccatatttatcatagcaaattgggatgaaccaggtttttagtttgtaaggttttctctgatcaaaatagaaaatgccagaagctgagaattgtaatctataaaatatgaggttcatttgttatatggggaaaccttgttattttttcctaatcttaagcawacagtgtaattgtattttaataaatctccttgaaaaagcatttaaattataggtccttaaattcttctcctttttaaacagtgtacccatattatctatgtctcatatttttacttcttcagaaaagcatctgagaccactatattttaattatagtaatgaaatatgatcatttttcatcatcacttagcaaagatttacaagctgagtgagtgcatatgatagtttctgcatacctctaaggaaccagggcagttcttttccacatattaatttcagctattctttagccctcccacgtccaatacaaaacatgcaatcgsgtaagtgctgttcagttttttcattttaatattgtgccaacaactgcaatttttcttcactcaacacagtttctcattaaatcttaagcctaatccagtagtaaaaacgtgctatattttaaaaatcttgaagtgaaacatttgttactcttctgataattattaaagccccaagccatcctctgagctaattgtctagtggatcattcttgycttctagttctaagaaattacaccttttttttttttgtaattaggatcttttaggtaagttatttaaattattactggatcttatcagaaagaaaatctttgacatctatgattttgataacttccccctcctttgagatggtgactttattcacatattaaagcaagccaraaccttgagggaagaattggagagtatattttacatccaaaatacttcaaacctttctcgttacatgaaactgtttttatttttttaaatcctgtatgtaaaatatgtatagcattaaaaataatcactagtcagaatttaaacaaagacataatatactaggtcttatgataatacattgttcactagaccacttgaatagaaacagaagacataaaaatattgcattggctcatcatggtcctgtctatgaagccagttcatagtttccatatggtctatctgtctagagctaagcattgctgaagcatgagccacatcattgaaaatcagctttatccctgactaaagacatgactcagaaacaccacaagcatggaagtttccaagtagtctctctggtcacctaatctgctgttgtcttcttgggagttgaagtagaagatgttacagcaaatctcttttgtctctctgcttagaacaaggtgtttcgaatggattaaacatattaacagtgaaaaacttctctgaggagaggtttccggattgcttggacctcctcctggggactgtgtgggaatttcagtggtagttctcatcttttatattttgtttctctacagtaatttaaaatttattctgtggaaaaaatagttactattccagattataaaaagatgagaaaagaatcmttccwttttgtaccctctgatgctttatgtagtcctgtggttcaaagaaacaagacacatgaaatcaaacatgaaattgtccagatttcctcttgcatcttttctctattcttgtgtatctgttcttctgaacagtttcagtggagaactactttggaagatgttgatgtgattttttttaatctaaaaattattttatatcaggctgtgcttataagtccaacatgttgtccagtggacagatgtgccttcatctggaggggattagagttttaaactaccaattttggtgaacagtcttatgtcctttcacttcaactctctggacaatatatttatttataacatgaagttaatatgttctccaaatttcttcccagggagtcagtgaaattaaatgagttcatttctgctaaagtacttttaactctggggaagcaaaatttatttttccttataataaaaagtaaatggtagtattacattctctcagtagacattggaaaaatatatacacctgttttaacagactgtgttatcatgtttaatttctttttttttttttttttttttttgaratggagtttcatgctcttgttgcccaggctggagtgcaatggtgcagtctcagctcactgaaacctctgcctcccaggttcaagcgattctcctgcttcagcctcccaagtagctgggattacagacatgcaccaccatgcccagctgattttttgtatttagtagcgacagggtttcaccacgttggtcaggctggcctcaaactcctgacttcaggtgatccacctgccttggcctcccaaagtgctgggattacaggcatgagccaccatgcctggcccatgtttaatttctaattctttattttacttaagagtagcagttttatttggtttgttgggaccaccaactatctttataacttttctttgacagatcgtttaatatttctgatcattagtttccttataatgcaaaaacaacaaaaaacaaactaaatttggaaagatggaaggtatctgtaaacatagacttttataattttgtataatgaatgtttatgaagccatgtagggccttattatattatacattattataagagacaggtatgaaaaacataactatgggagacaaaatcacagcaaatataatactttaagtttgatagataaaatatttrtcaaacgtatttgataatatatataatgtaaatgaaatatttatcaaattatgcctgaggtcgcaatttttttaatttttgcaatcagaccttggcaatgaccttgagcagtagggtattaaaatcttccacaggcttagcgtcccaataatggaacactaagcataaatggattaacatttgtttatagaacagctatttgccaggcactttttaaaacacagagaaaatataaggaatggtgtctgatctctgggaactcagtctgttaaagaaaatgaaattgctaaaatagaaaatcaatgagtgaatatatgccaaatggtacaatgctgactattaaggtaatacaaatttaaagaagggaaagaaaagactgaaataagttagagaagactttttaaatataatcatcatttatagagtctttcctttataccaggaaggcattgtggttgtaggaattctttctctgagacacggtaacatgcagcttaattctaggaagtaaaacaaacaaatgaacaaaataaaagaactaagttaaacagtggagccacttaatgacctctgaaggtcaggcagaggactttgggtattgtaatagctaacagggagccatagtaacatctggagcagaagagtggcaccatagacatagcagatgtttagggaagcgagtcttccttacaggctagaagaagtctggggactaagtaagatggaaagagaaagtcaaagacatcaaaggcactagctaaggttaacattttataaaatactgacataatgatgctgatgatagtaacttttataatatgtattagtagctgaattaatataattaaacaagggggcaacggtacaaactcacagttgtgtcctgcagtctcatcatcatggctgcagaaagagaaatttggaaaaaataaacaggactgggttagaacttccagtctataagaacacacttttgttgtatttgtagtatttgttgtatttgtagtattgctgctaacaccaataccagcctagaagagttctttctttagaatcagtgttacacttgcctgtggtacttctctgttcttgaatattgtaacatttaacagatatagacagcatttgtgagagcaagtggtgggactcatgtggatctagatagtgcgctcttcagacgactgtgtcctctatttctttcatgtcctcatatatctagaatcctactatgtgcttatgaggaatttattaactcatttagacttttaactcactgaagtagggttgaagaaaattctttagtttttataggattcagtttaggtgtagttttacctaaaatcaggtgcattgtctaagtgttctgaatagcttcattcctcacttataaaaatcagttgagcagccatgtacatttattgaactcatatgagacaggctctgtgctcatgctacagacaaagtagtgaacaaaaccatactggtctttgcctgatggagtctgtaggctactgcaagtaacaatcatgtttcatgtaattaattgaattataaatcacaggtttgccaagtgctatgaaggatattaattgagctaagggaatgtacaatgaaagacctagtcagaggctgactctgctctgtggaaaaaagaataaaaaaagagtatgcagtcatactcttcagatgtatatagagtcaatttaaaatatttcattgtgtatatataccacattttcttaatccattcatctgttggtgaacacttaagttgattttataagttggctattgtgaatagtagatttttttataacttggctattgtgaatagtggattttataacttggctattgtgaatagtggatgaatattttagctagattgatttaattattcaacgttgtattcataaatcataacatcattttctaccccataaatgtatacaagtacaaattgtcaatttacaggaaaacgaatacacaattttgaaatatttatattgaatgatttaaggaaaaagtgaatatttagatgttttatcacagaatgaggctggtgaagtggataaggctataaagcccctcagaacccctaagctgtttgacgagacagggaaacttcctcaagagaggaaaaccaaaccacaaattagcagtcgatatgtcattgtgtcacaatgacgtggagatgtatgggatgtagattgatcccacatccaatgaaattgtttgacccccaacttaaggattcatcatgtagagtaaacatgggcaagggttttagtctttctgcagatgagcatttcagagcaagctgtgcaaacagagatttaggaagggcaccaaggttcaaacaagaagttaattcacaaacaccgccaccctcattattgggattatatgtcctggacattgaaaaacaacatttgaaaaggcaggacaagttaggtttggtttggttttgtttttttctcagcatttacccatgagtctagtgtggccactctatgtatcctcttatctcatggattggaaactagtccccagattgtcattaaaaaaaaaatggaggatatatactgtctgaacagtggtggtgagatataggttggatctgaaggaaacattactggaacattttatatttaatattttctttaatgatgttaaagaaggcattcccttggggaaataaatgtcttttgcagatgatgctagaaagaacgctaaaacacaaattagaaaagcatatgcaaacctcaagaaacttcacttaaaggtagataacagaatgaggttcatcttggaaaaatgcagactaatagtaacaatacctttgggaaagaataatctacaacacagatactcagccagtgagtgggcgagttctgggcagaatgctgagctggctaagaggtgagaaaagtcaatgtttgcaacacgatactgtaggaaaacagaccagcatagttggagctggcgtaracactgccacctcgagtttacacagagagagagcaaaggctttggtgtctgatactttctcaccaatattccttgatagagatttgttgatatttctatcatttaatatttgtaaacataggcatcaaataatttcaaataccacagctagtattgaggaaaagcagacagataatagggacttttcatttttcgacaaggtattttttaaattgtccaaatatttcactgtggaatgatgactagagagagaggaaatatcagctgtatttttttttcttcctcttgttcctratcaagggagggtttgatgaaaatgaagctgagaagagaaaggatgtctaaggatggtttataaattgaccataaatgtgtggtttataaaattagccaaccctaactagaagtttcttggggtccgtgaatatctataaaaacgtctagaatctccaccaagaaaaaatggaaaataatttattcaattggaatataaaaaatacaccaagcattaagtttatttcaaaatacatacatctatgattgattacatagtaagcatatcaggatattaacagtatattgaagttattattaaccacagtttttattatactggtgctgggcagaagtttggttagtagaatgcactgctttattgaatctgaagtaaactggtatttcactaatagtatttaaattcaagataacagacttacttttaaagaatcaaagaatcttttccaaattgcaaacatgatgttaaaggattttattggagggagggagactgtgagaaggatactgggaatttctgtaaaaattatttgagggcaggcacagcagctcatgcctgtaatcccagcactttgcgaggccaaggcgggtggatcacctgaggttcaggagtttgagaccagcctgaccaacatggcaaaaccccgtctctactgaaaatacaaaaattagctgggcatggtggtgcatgcctgtaatctcagctacttgggagactgaggcaggagaattgcttgaatctgggaggtagagattgcaatgagctgagatcttgccactgtactccagcctgggtgacagagcgagactccgtctcaaaaaataaaaaaaaaattatctgggagtccacagaggagagtgtatcataaactataaaaataacagacagatgttcaagattgacctgtgcttgcaaatcaattaactgtacgacaatcttcccttttttttttttttttttgagatggagtctcgttctgtcacccaggctggtatgaagtgttgtggtctctgctcactacaacctccgccttctgggttcaagcgattctcctgcctcagcctcccaagtagctgggattacaggcgcccaccaccacgcccaaccagtttttttatttttgatagagccattcaccatgttggccaggcttgtcctgaactcctggcctcaagtgatcagcccaccttggcttcccaaagtgctgggattacgggtcttagccaccacacctggcctgaaagtctcctttgatacaattgtggatcagatacggacgctgtggtctgatcttaagttcattttcacggacattttgtgagagcctattatgagccaggcattgtgctaggcattagagatacaaaatgatcagaatgtgatcattgtctgacagaatgtgatcagtgtgtcacagatcatcacaatacagataagtgcagtgaaagaggtcaggatagggtgcaatacaaaaggcaaggagagaattctccccagagcatagaagtgggtgatggggaggtggargacagggaaagagtgatgcctaagttcagaaaaaactgtgaattttcaccccattaataacaaatatagaacaaacatgatcatgttaagagcaaatactaaaatttttaaaaaccctgatttccatcttctaatctgattaatgaaacgaatggtatatacatacacacacacacacacacacacatatgtatatatatttaaagctacaacaagtacttgttattcagatccttagattgttctcagacataaaattcttggaatttgctcaaactcatgccaaagcttatttttcaaactcaggtttgatttactgttattcttatcttccaggaaagtgatggattgaatgtttaacatacaatgttgataatagaaatgtatcagaagccagtctccctagtctgttagaagtaattccacagaatttcacagagcttatagatcaactgggttttcatttgcatgtgctttctctacacaatcaatgcagtgtgcagtttgcatatgcagaaactatctcagtttctgcttttcccttccatctcatttggcaacaaatttagatgtctctgaaggctacatccttttgttgctgaacacttgagttgcttgggcacttgcagtttgttttacctcaacgattgtcttaaaaatccattttatcaagaaggatttttagaagtcattgagttctgtcgtccctgactggtaatgcattcagaagaaatgatgttggggttttctagcagtgattccatgtgttagaataagtatcatttcccagaaccttagtgggaaaagaggtctttgataatcacttaattacattccttcattttatcactgaggaaaatgagaccccgtaaagcaaaatagcgtgtccatgtgcaaacagcaagataccacagtgccgagagagggcgtttgcctcccttttcccagttcagggcaccttacgtcttgaactttaatctacatccacatctcttagggatcttgttaaaatgaagcttcttattccatagttctcggctgtggcctgcgtttacactagcacactcctaggaaatgctgatgctgtcagttctaagtaataacagggtcttataacactaagaaacaatgctgagaaaattcatctcccaaatgaagacaaacactagcaaaaggatagttctggttgagaggtagctgctatttccaaaaaatgactttcatacctcaagtagttctggtgttagtgcacccagttttccgtatgattttatgatagagataagccatcatcttatgctagcttcctaggaaacatcatgttagaaattcatagcagttagaaaattgattgggtaggatttctgactccctttacctagttgtcttgtgccttctgatcacagaactggttataagatgcctaatgacaatttccttataaatgccttccttctcttaaggaactcgtgattccttagctatttgttaatttaatgattcttactaacgtaagggcatttcctgccttgagcaattgtgtggtgtgtgtgtgtgtctctcttacacatacacagcgtgttcacatatcttatactatgttcttttgtaagaaacaaatggattatttgtgctcagtatgagaattttaacttttatcaagaattcaaagaagcaggatggaatgataattactgaatacatcattaattctggaaacacctgctttaattatagggtttgtctatatgaacttatagtcctggtagagaaacaaataaaaaccctatttacttcagaaataattttgtcaaataagttatatgaaaaaagttcccatgtgttttttcttatatacgttcagtaagaatgtgaagacattcttattgaagcatatgaaatggcgtctttttgagaaatgacccaacctctttttttttttttttttttttttgagacagagtcttgctcttgtctcccaggctggagtgcaatggcacgatctcagcttactgcaacctctgcctcccgggttcaagtgattctcctgcctcagcctcctgagtagctgggattacaggcgcccgccaccacacccagctatttttcatatttttagtagagacagggtttcgccatgttggccaggctggtctcaaacacctgaccttgttgtgatcttcccacctcagcctcccaaagtgctaggattacaggcatgagccactgcgcccggccaagcttatacttcttattgacatgtttctcaaggtagctcttcctctattccctgcagcaaaaatattctaaacaaaaataatccgtttacttatatgaaggtgtttccaagagtttgaaagagctgtgtcaatataagatgtttgttgtttaagcttaaacacatactcacagggcaaaaaatctgaaactgctagtattttatcgcgcaggctattttcataaagtaggagaattacatataccaagtcacttggtgaattggtttgaagggaaatgaaattacccctatattggtaacaaggaacagttttgttcatatctctttgatgccaaaaatatagtatgtattcttatttactctgtagtgaaaagggttgtgtaaaaatcactagggatgagctaccagagctaacttggataggctctttgcttgatggttgctgtatagatgaactattaataataattatgatgatggatgttgaggattcaaaatgatggtctttctatctgtaagtatattgcttcctagaacctttcagtggccctttttattagaggatatactggtaaaatcaatcctacttaaaatgctttagttattagagtaacagcaacagcaacaacaaaaaagtggtaattataaagagcttccatatttaagcacagccccattgcatgaccttaagaacaatattatatcaagattctagaattttgatagttaaatatatgtgagtgaataacatgaaaaatgttatacagttttaaaaatagtttttccttaaatgcaaaatgacatgtattaagtaattctgcataagaataactgatctaaattttaaaatgtatttgtctttgatttgggataatgcaattaagtgaaatttgtcttgataaaaatctgcttctagtatctttgaacattaaaaacaagagtttatttgtaatgtctttttaaaaaacagggaatgtagtttttcttgtcaataatcattatagtgtgaaagtacttgacttctattgtttaatgacttaacttgtaacataaaacacccatgaaataaatacacaattgaaataagtatataaaagaaaaagctcaagatcatttattgataagagacagggatggaatcatgttagcgcttatcaaaaccagtgtttcaacatagtgagaatcaatgatcagtggcaaatagggtcatgccaaagggaaattgacagctctccgggccatgctgcctcttattccacatttcaacttcactctagttaaatttcagttaaccaatcatttgaagactgaagcaaacaacaacaaaaatctgtaacccacagttttcgtgggacatggttttctaaatgtygtgtcttttcttttctttatattgcttggtaccagatcatttttaggaatctccatattccataggaggaaaattgccagtctgaaagctcagtgtctttagcattttttttttgcttaccacatttttgccctctaggtgccaacctggattcactggagcaagatgtactgagaatgtgcccatgaaagtccaaaaccaagaaagtatgtcaaaataatctgaaatttgctttctcccccaactacagcaacaatcactaccacttggtgcttttacagctcagtcgtaactgattcattttgttctaattatggcttaacctctcaaggcataaacccattcagtgttaccttatttaactgtctctcaaagtgggtccctaagtcatcaatttacaagaatggccagtcacgatggcccgtgatgctgacaaactattgcaggcaagccaaccgagaaacattttcttccaacgtgtgtgaccaaagccatcatatggaaaactgagatgaataaaacatcggatttcattttaaggggttccctttgaaagaaggcaaccacttaaagtgctgggatctttccaccataccaacttaagaactgcattctgtccaaatttttaaccatttgggggaagtgccagagcctgaaagccatgatcagggcaaagattcagttcctgagggtgaactcaccaagtttcagtcaaatgacactgaaggagcttctttctagcatatattcacctcttctctttttctctgtttttctaccattgtttttttgtttcttctctcaggtgcccaaatgagtttactggtgatcgctgccaaaactacgtaatggccagcttctacagtacgtccactccctttctgtctctgcctgaataggagcatgctcagttggtgctgctttcttgttgctgcatctcccctcagattccacctagagctagatgtgtcttaccagatctaatattgactgcctctgcctgtcgcatgagaacattaacaaaagcaattgtattacttcctctgttcgcgactagttggctctgagatactaataggtgtgtgaggctccggatgtttctggaattgatattgaatgatgtgatacaaattgatagtcaatatcaagcagtgaaatatgataataaaggcatttcaaagtctcacttttattgataaaataaaaatcattctactgaacagtccatcttctttatacaatgaccacatcctgaaaagggtgttgctaagctgtaaccgatatgcacttgaaatgatggtaagttaattttgattcagaatgtgttatttgtcacaaataaacataataaaaggagttcagatgtttttcttcattaaccaaacagtttgcattgaggcatttttttaaaaaagcatcaagtaggaaaattaaaaacaaacatttcacagcaaatgagatatcctggcttctgtttacgttgcttagggaacaagtaattcaggcactagtttaaacaattatttatttatgttaccatttctttatgttagtttcaaaagtaacttagaataaaatagttactgttatttgtttaaatatttattttgagatataacaactcaactataggataaatatgtgtttgtatatatatatgtgtgtgcgtgtatatacatatatatataaaacttaaggcaaaacatatatatatatatatatatatatatatatatatatataaaacttaataacttaaggcaaaactgggaagtttggatagatgttcgtggcttcctgaagttttgaacatcattcctaaaagacccaattcacattgtacataattatataaaccaaaccatgtatttgtcctattgtgaactggacacatataacttctgatcctggagctttcaaaatattgcatttaaaatgcatatcatgtagttatccttgtagatgaaagaatggcaatttttttctgtaaaggttcagagagcaaatattttaggatttgtggtgacaccatcactgtcacaacaactcaaacctactattgtagcatgaaaacagctgtaaacaatgcataaaactgatgtgcatgggtgtgttccattaaatctttatttacaaaagcagacagtgggctggatttgtcaaccactgatttagattgtcaattgctcaccccgaaaaatatgtcacatagcttactgcagtttaaattcacctaacataagaaacagtgatgtaagttggttatttaggggtcctaaaagaatcagatttacccttgttctgatgcatgcagagaataagtttctgtaattcctgttaacatagaagtttccagaataaattctataatgtataatgttaagattagacccgtaatgtgcaatcatttatttagggaggtagtatttatttatttacataggctacatatcaaagacaacttcgtaggccattttctgttgtgaaaaattagtaaattggcattgcaaaatttccaaacagccttcactttattcacaaacatttaagtaatatgcatttagtagggagaatttttctatccacagctaaagcaaatagcttgatttaatttttaagttaattttttaaagctaggatagaaaataaaaataaaagggaaaaatagaatgttatttaataccttaaagcatttctcttagaaatgtgtatttgtatttaaataacatagactcagcaaatccatgtggctagataaatgcagtaaaatcatattttagactttaatgacaattctgatcacttaattaagttacacttacatttttggtgttaagagttttactgtgctttgaaggcaatgttcaggcactatataaataaaagcattaaaaatgaagctatttcccagcataattatgtagttagatctgacagtagtaaccagagaaaatattttcaacttctcttttagaccatttgctttttcagaagatatcattttaaaataaccactatgtttttgtgaagttcagagtgtgattccttaaataacttctttagtatgctttcaatgccacttttggacgacatccaggaaagcagcattcatatttaacctgatttaacaaagattgattgcacatttatgaacaatatatgtaatggctgtgcaacagagatgcctcatgtctggaaaagcaagagcttccaatcagaaattgctttccagtgttgtcttaccgagagttttttcaatttttatctctgcaaacccctacatagaagtcagaaaaataaatttgtgctgctctaagaactttatgttcaagtagcagtgaaagccagaataaagatagagaatgtcaccatagtgaccgttttaaaatttaattgtttgtagtcttaaagtctggaaaacataaattttgaacacaaactaggaaaagatagtccccagcttcaaagagaaacattcaaaacttaccaaactgcattttcagttgaaaaataacattctaaagaatagataattttttaagtttattaacataaaacttacattattcagacttgatacagtgattctggtcagaatgtccaatgagccatttactgatttataaaaactgacttaaaatatgaaagagagggacaaatgtatattttataaggcagtcatttgccttgaaataaaacattatatttatagtactttctaggaaaatattgtcraggttagtcagcttcaaatttgacctaacttgacacagaattcctagttgaaaaaaattgtgttcatcsatatgtggtgtgtggggggtgtgtgtgtgttcrtgtgtgtgtccacacgtatgtgtgtgtatacaggcactccataatcaatgtacagattttagggaggaaaaaagaaaaagcacccacactttcaatagttaggggcagtacagagcaggtatgtcatatataaactaacataataggacctaattatagaatagctcaaatttagaatattttaaaagattgtaattttagaacttttaggaatattctcacactgagtaaatttagcagatatccttaaaagtagttttgaatcacaggttactagtgcatccatcatttgcatggatttctaaatgcaacctgttgaaattattcttgttcatcaaacatgtatcttgctaaaagtagaatagaggaacacttcacctgtgacaaaattgccataaattccagccaagtgttagtgagattttactgtgtgtgtgtttgtgagtgtgcttatgtgcacatggaatttgaaacttaaggagaaagtctccgttaacatttcaaagggcccagtgacactacggattggcatatgtgaaaaaaaacagtatctccattttataaaggtaagtctaaaattaaaagacagacactaaattggtcctgtttagaattggcattgacagaactcctttcgaaatctcagcggtacagaaagtcaagactttaagattttaagtctttgaaatgattagcataaacaggcccaagatgttaaagagaaaaatcctaaatgtcttcaaattttaacaggaaccacaattgcatggatatataatttttgtaaaagaaagttgttctattgttctttcctttaatgcaattgaaaatttaaattaacctacaggttaatcagttttcctcaagcaattataaaatcctaagacaaaggattcgtgagtcaatatttaatagtttctgaagacttttagatttaaattaattttttatattgctcagagcacagcaggaaatcacatgtagaaaaggaaactagattgtttacagtaaactttgtgtttttgaattattaatttaatttgaaaaatgtagtggctaggcagaagttcaataggaagcatgtgattcttaatgagtccaggccaacattagattaagtagaacagatagaaagtaataaccttttcataaaatgaaaagtgttcgtgtattctgctttttttttttttttttgacttacaatgaaagaaatgtagctaccaatagtaaaaatgaattagagcattatttgctctgggtctagtatgactgatgcatgttccctctgcttgtttccttgttagggcttatggccagaagagattccagttttaagtaccaatttcccattgaattatttgaaattggagctgcctgatatgaatgacttcccgtgaaatgaaattatagttaggctgacagacttacctataaaactgtaaatgcagtaatatgtatgcatgggcatgctactaattttattgaagacttaaccaagctttctatgcaactaatatagatcatgagcagtgttcatgtaggcatggagtcctgactctctggaaagagtttctgtagacatcgcttgattttaacccttaaattattactgactggtaggagaaaaaggcaagggaagggagggggctctagaaagaaaatctgggtcccaccttcatggaaatgagtaaggaaatttattattgacttccttggaaaatgaatgttttcacgtggatgttccaaagtttgtattaagaaagcaaatgggaaaaaaaatgaccaatttttgaccaattgagtgttgcacggaggcaagagaaatttatctggatttgaataaattattttgctgtgaatattgtgcaaccaagttaatcgtaactaaatcccctagcttttaatttatgaaaaatatagcttatttgcttgtgtacactggacccaaggcagaggaaattattatatatagtgcttcccattatccttgttatgcaatgtactttttgatatatgtgtttgtgtgcatatatgtgtgtgtgtatatatatatatatatatatatatactttaaaaaatctggggagctttatttccttaaagggcagcaagtttttaagttttcaagtatccccggagcttacagagtttttctgrctagttaacgagaatacagtaaatggcccagggtacatctcttgatgtgtytgctacccaagctgttaaacccttctgctgtttgccaacatatttcacgtctcctttactccccaggcatgcccagtgaggcatgtgtttgcataagaaatattttgttaatgaaaaattaacatgtccaaagtcactaaaaagttccacggcagaggcaggacccaaaaccaagatgattccagcacactcatctcctgctttttccctctctatatgaggtactttttccatgcccaaatgcaagtttttgtaagagaaacacccctccacagcattttcttcacacttaagagataccttgccatatcattgaatagcccttgtatctctcgaggcagtgatcaaagaaagaaaatatagatctccattgatatgctgtctctccttccaacctgcttcttgaccacacacataggcgcatgtacacgcgcgcgcgcgcacacacacacacacacacacagagagagagagagagagagagagagagagagagagagagagagagagataaaggaagtcctagagccttccgcatcatgaaatttgattatcagttttggttttgagaatgaaaagtgtcatccctggagattttttattttttttatttttttggggggcttgttttcccccacttcctcaatggagcctctgcaggttctgctgttcttgcaatcctggagtctctggagtcccagctgccaggattgctggctcttggctcatacctttgagtccacttccctgggcagccctgcaggtcctccaagtggctgtgtgcatgggagtccagcattctggagaagtgatttcactggctctctgtgatttaaaggagtaataagatgaaaaaccctaggaattggatctttcccacttatttttttccttacagtttgaaaaaagtgaggcgtagaattgtcctatgccatacagaacttatatgagaaaaactagaaggagtctccagtgtcccaagcccctgtttggggttttggggcagaagcatttgttgctttctgtgaatgaaacagacaagtgatgaggaaagtggaagattagaagaagtaaaagagatacagctaagaaaataattagataaccaatgagcaagaagtatttgaggccagctacccacaatcaaaaatccaagtccaacctgataacattttcagaccaaattaccatcctcttggcttctgctcctgcctctgccaatgggtgtctttgggtaaaaattaattaattaattaatttaattaaataaaattcacctccttggaactttgcttctgccttttaaaaaaaggaatgaaatagtatcaaatgccttttctgattataaagataatctttccattcccacacaaggaaataatttaggggatagttcagcgacagaacttctccctcagtaaggtcttttaagggttaataaagacacagtgtgctggtattttgcacacctcataaaaagagacgttccctatgtgaactcacagaggcgtacctgagcactgcttcttaaccacacaccatttgtctggttcaatgtgcatgcacagagagccataatagtcatgtgtaatgtgttttggagtgcagtgtattgctcttttctgaaactttttccctwtctttcttttttttgtcaactttctgcattggcagagcatcttgggattgaatttatgggtatggaccaatcatcattccttttagcctgcagaatttagagcctatgagctgaaatctttttcccttcctactcttacctttcagttcctaactaatttcctttttctttagaagggatcatacagctataacaatgatttctctgccttcaatctatgattagtttactgaaatgttactgagtgcagcaggttttagattcctaagcatccttcacttagagtttaaaagtaccctacctgctgcaaattcacatatatcccacgctgcttaacccactgattggatctagctctgctgttatataaaagctggggtaagtagtagtagcacataaaggatacaggggaaatccactcagagacctgagaacaaaggctttttaaatccatctgcttaaaaaacacacagcatcttagcctggtaggatttttggcatacaatgtaaaaatcatctatttaatataagcaatgtaatgtatatagaaagcccttacgttacaacacaatattaaatgcacagacttgaattactcagattttctggagatactcaagcaccaccctagtcaacttcattatcttataagaaggaaatagaaaacagaaagaaagcagccttgtgctattttaggtggagattccagtggtaatggaattaaatttgagtcatgaagattatccagacaagtaatcaaatagaaaatttcacactgtcaaagtaaaagaaaaatatatgagtatacaaaatttggacacacttttttgtaaggccttcatcctacatagttgggattgaagaccagtctctggggagtaaggagctgtgctaccttcccagagactccacagggccaggccagtcagtctttttcaatgctgcctgcagtcccggaccatggttgggtcagtgacacaatgtcctgattcacagaatatctggtccccatccagctggcttcagggacatcatgcagcaggggcatcctacagctgctgccttcttttggatgataacatcacaggctggacataatgtagtttccagactttgcgggaaatgaggcagttgcaagctctagcagctacagggattgctcaatgggttgcccatttcttcctcaaaaaaaaaaaaaaaaaaaatcaggagtaaactaccaatttgatgagaagcccccaggtgcacgtgaatgggcctttgtgcctcgcagaacatctccaaagagggagaaacacaagggggagcacctctattactagggagcacgttgtgtactgaggggagctatctattggagtttcttccctcagggaaaaaaaaaattgtcccacttatgaaatggattattggcctatcctgcagggagggaaaaaattctaccattaccccaaaccmttctatccttaacagcatatttctcatttttatagctggagggtctgactatagaatgtattgtttctgtccccaacagtaaagtgaaagacagttgagatatataacttccccctcagtaagatcttctatgggttagaaaagacacagggggctgctatccgcatgcttctcaaaggtacagtttccagaggctcatagttccaggcttgccggtgtactaaaccagaacattgcatccttcaggaaaatcagaccttaaaggtcaagtacaactcagaaaggtaagggctctgtttcttggccaggccagatcagactgaaaaatgtgcttgatctggaaacatgttagtccagccaaaccatgaagactctggggcatttgtgctcattgagagacagacccaccgatcggaatgacagactcttgtttttagccctgtctgtctctaatttgctcttccccagttgacctgacacataagaaaaaaattaatatggggaaaaaagaggttaaagaatccattgtttgtattatttttcaccaagtatttttccttgatcacattcatagtgtgggatcacctgattgagccaaaccatgaaaaattcaaatagcaatgaggataagggttgtagtgcatctggtcaatgctgatgtgaatataagattttaatcccacgtctgtattctatgggccttcgcttgaatcagctcattctagtgctgttacattaccctttggcctttactgagctacctctttatttccatgaaatgatcattttactggaaaatgtgtgtcttcctacactgcatagaaagaatgcacccgtcatcatgcaccatatgtttccaaacgcagctcaatctattcttctgtaattaacaacaaccaaaagacaacttgtcccaagaatccctgagagtatgcatgattcctttttcccatttagcccttgtccatgtccccatttttgaagtctgcagaagcagtttcctagcttctttctaaagataggatgttaagatgtcagtagacaagaataaccacagacttgcccatcttcaaagaagaaaacaatagaggacggaaaagaggacaatcatacagggccttcatctcttgtcaataatacctacactcctatttcttcaccaactcatcacagcccagggagctgtgctctgcatcctgggtcccagggagagaaggaccagtggggtgacagctttgcttcttagacatgtatcctaaaacctgatcaggataccaagatcaggaagagaggctacagcagcagcttcaaccagataacaccccatagaaattaattccctgtcctgtggctatgggggaggggargcagcagacatatgcaattaacatataagcactcacattccatgtcctcatctgacttttgctgcacacaaaatccgtgataccaactcaatatctcctggtacattgtttcaccgcaatgcaccagccgcttcgctttctaattgtggcttccacatgactgctagattaggagttatgctgtatggaatgacccttccaactttgcatccaccttttmttcccacccaagcatttcctccctctggttttcttttctttctttatttttcctcccttagtatcaggcatgctgtgccagggacttcagatggctccttaacttttaacctwgttttcccttcctcggtctctctgtcattctgtcagtctgtckgtcctcttggtttgtttttcctttccacctccaacccttttgatttgtttttgtatactctatgcagcattctagtcctttacccackgacttctcttttccttctcctcctgttaataatcagtgctatattaatttgatttgacaatgttcttgacctgtttactggaatttgattatcatgggctcggcttgtaggaaatgttttgtttcatgataaggtccactgtatcctagaaattaaaattcactttttcatttcaagaaaacttcctgcaagctgccctctctcaaaagagaaaaaggtgtagttaaaggtgtagttgtgccactgcagatataatatggaaatatgctttgaggttcccttgttgatgtccagaatagtcagctctgtttgtacagtattccccagttcttgaccaatttattgatcataatggcaagtgaacagcttacactgcttatttcataccagttgagttctctttctgagtgaacttgtgaagatcttccaataaatgtaattagactcactggaagctcaggtccttagggatcagagtccctattaaatcagcaaatcttgttaagaacctgacctaccttagtataatcaacttatcccccaaagaaactaactcgcaaatagaaaaacttctatgaattagagactgatcgcattttgggtgcagtagtatctttggttcaaagttctaagtgtcacatttccttagtataatctacattagctcatttgccaagttggccaacgtaggaatgtgcactctattccaaatcacacatcatttgtactggtgacttctttggacaaataaaacttgttcctaagtacaattggtggagtagttagaattgtcttccaaaggacaagtcaccatttgggcccataactgtcctacccatcacataggattttctttgatacagtgccctgctacctcatattgtattgcttcttgtgttcacattttactgttaaatcacagasagcctgactcaatttactagttaactacaagccaagttcatgtttgcaaatgtctttgaatttaatatatttaagttagaaatgactctttgtaaagaccactggatataaagtgatgatataaaatatctgggaaatacaaaaaggccaggggctgggggataaagaggggaggaaggaggaagtggggggcgcccagtgatgccaattccatctcctttaattggtgttgattcctgttgtctttgcaagagctttttatattttattttgcaagagactacaaaaaaaaataawactacagagttttaaccaaatagttattttataattaatgtttatgatttccaatttactatcaactatatatatctctatagcttataattagaagtaatttctgagtataatatttgtattgtaaatggccccagctggcttttttatatttatgttcaaagcatagtgcagagcatgttgtaccttagctatgtgtgtaaacgtaaagaattgtcatgtatttattttcttgtgaacatggacaatgtcatgcagcatgcccactgtttggttgtagtcagtcctggcaagtggaagtgacctgtgatgacatctgctctcatccctttccagaggcggaggagctgtaccagaagagagtgctgaccataaccggcatctgcatcgccctccttgtggtcggcatcatgtgtgtggtggcctactgcaaaaccaagtaaaccttctttctccatgcctttctctctccttcatgcaragacagcttagatggccagggctttgcagaatctgagctccacagcctagtcttggggataaaaaaaaaaggaggggcagggggagattatttcctctgaataatccattttgaggatgtctcctaaacacagaaatagaaagctgtttgcctattcatgtaaagatttctgttcaatgaccacagcccctgagtggataaaggcctggagggacaggcttgtatggaaggtatgtgtgtgggtgggacagaatgaaggcacctcattctaaaaggagagggagggtaccagaagtccatttgagggctttagtataattaagttatccccaaaagaaactaacttgcacctagaaaaacttctatgagttagagactgactgcattcagggtgcagtagtaccttcagttcaaaggactactgagaacaaatccaatttacactgaaaattacgagataaaggaaacctttcgtggtatctgaaatgcagttttctgagttatagtgattattattattatttttaaattctatctaattaggttgccagtatgaatgctctcacagcctgagatgtaaaaaaggaatctcaggggaggaaaatgaagcaaaactttctttgaaaacataagagagaaaacattagaatagatttgggttccctatgtttggtcttgaagtttggtccgtattaacaaattcaattactatgtgacatggattctcttcacttttctctcctacatataacttacatttcaagcctaatatgttaaattaacaaggtttttgaaaaaatgttgctgcacgatactctgttgccaaaccatccatgggaatatttcataatctgaatgttgcattgaggaagaaaaataatatgcttttatgccacaaaatccaaagcatggattgtattttgtcaatatcccatgatttagtgtgttgccagaattaagggatagagataagccttcctggagtcgacctggtgagtctcattagattccatctcaatattcgctgcctaattgcacaaaaagcgttaccagagtaggaacatgttacgattgtgccaaaatccgctggcaaaatatgtccacattctcacgcgtatacatgggatacactcacaaacatgctaactgtgtatattcaaaactcagttcattttcttaagagaccccaggaaaagctataaatgaaatcactcttataaattctacagcacattttttttttttagacagaatctggctctttcacccaggctagaatgcagtagcacaatctcagctcactgcaacctccccctccctggttcaagtgatgctcatgcctcagcctcccgagtagctgggacgacaggtgcacgccaccagcccggctaatttttgtattttttgtagagacaggacttctccatgttgcccaggctagtctcaaactcttggactcaattaattctcttgcctttgcctccgaaagtgctaagcttacaggaatgagccaccccacccagcccagcacaaattattatctaagacaaataagtgtccatttgtaagacttaggcaaagatggattgattaggaaatttgtgattttagtcaattatcaagttatttgtgttatcctatttttttcttgtctctcagtaaaacagctaaatttccataagaatcccaggtggcttttaaaatctgtttggtaaggatgtgtggtttcacttattctgggatacagtggacatactcccttccctcttcctcatcaccagtctactgccttgaactactcataggtgttggtagaataaagacttggctctactatgaaatgaaaataatcaaaaaaaaataaatgctccctttcttatgtccaggaaacagcggaaaaagctgcatgaccgtcttcggcagagccttcggtctgaacgaaacaatacgatgaacattgccaatgggcctcaccatcctaacccaccccccgagaatgtccagctggtgaatgtacgttgactctggccagtggaaaaaactgagcctctctcctttgttcagacgccttgaagtttattttcgaaagctcttaagcttttagctgctgccattaatcaccatggcttccaggaatccaggtttttgccaggagaaaataatgggaacatttttaaaagtggatttggttactgtaaaatcagcacatttcctcttataaagtgttcattaaggggttggaataatagtgttgggtttgttctgcaaggaggccatagctggggcttgcgtggagagagtggggagaaaacaaatttaatagtacgataatcaaaaagaatgttttcatatataacttggaaatacaggctactccattctgtaactgattagtacagataaccgagcaaagagctttagagttattttcttagggcaattcacagtgcctgatgatttactggttatgatttccaaaggattctgatttcctttagggcgtggaaaggtcaagtgacttatcaaacacccttctcagtagcaaaagaagagtgtcatgccagcttcttccctggccctttctaaatgatgtcaagccctccagatgaaatatatccataatcattaaaatatttttttcatactgtaccaaacactcagcattcagttttttaaatacaactagatcatagaatattaggttctggagagtttgaagatattatctttcaaatctctctttttctttttacagataagggccagagccgcaccatctcttggcttttggagtattgctctttatattccagcatcatccttcttattttcaaattattgctctgatgtatggtttttttaatacacaaagcttgaagcttatattgtagtaccattttctatcctatagaaaaaggcatattttgaatggaacagatatatcatagacccaactacagagttggtggttactaaactatcagcaagtcttgtagcaaaaaccttcaaaactttgttggagcaaggtgcttataggttaacacactctgttgccttttcaccctctaacagtgttcatcacaatgttctccacatttgataacgatattcactacaaaaggaactataatctgtcactctgcatgttataatatataaacggtagaatgactgcctagattacatttactgctcacattgtgcatctttgggctttaacttttctcaaccttatttcttcaatataaaaacagacctaaaaataatacctacttcagagactccttgtgagccttaaataaggtaatttgcataaaacacttagtctagtggcatttagtgagtgttcaataattgttaagtatttttttcattagattcactgagcttatgttgccttccaaaaagcaatagtgaaatggttcagggactggaagtaggtcactgtgtatcctttccttaaatcaagctagctgtacttcccaggaagatccacatggaatagcctttccactaagagaaccagctagagtttcaagcataattcaagctgtatatttttggatctccctgaatatatttagagcccgcagaccgtcagattataaagtgccttatttcatcaaagagtattcctttctattggttttcctattatttaactcaatttggtataaatactaacagcaattaaaacacaacttcaaaaaggggcctccctccctaatagaaacagtaaaaactactgtggtttgctgataaaaataaagtagactctgactaggcatggtggctcacacctgtaatgccagcactttgggaggcagaggtggacggatcacctgaggtcaggagtttaagaccagcctggccaacatggtgaaaccccatttttgctaaaaatacaaaaattagctgggcatggtggcatatgcctgtaatcccaactaatcgggagggtgaggcaggagaattgcttgaaccgggaggtggaggttgcagtgagctgagattgcaccaatgctttccagcctgggcaacagagtgagactccatctcaaaaaaaaaaaaaaaaaaaaaaaaggagaagaaaagaaaagaaagaaagaagagagaaaagtagaatctacctgcattaaatagaaatgtcctccatatattatgtgctttgtcaagatgtgtgcattgacaacaattgttaagtcccttatcagtagccttgttagccctaccactgctaacaagttaaacatttcagtgacattagtagggcaacatgggcactaggaaatggaaggagaaaggtaggcccaacatatagagattctgaatatttttttctagtgctttgaaatttgaaactatacaaatcacctgtctgcttctatttcaaatagcatttagccttcttcaccttgcaataccatgaaacaaatgaatgttggatggatatttgtatggaattctagtcattaatttaaaataaaatagaagaaataggacttttgctgataaaatgtagttgggatgatgggccgtacattggatgcacatccagagagtatttttttttttaactctattcatctaatctaaaagccacagtagccaggacaggattttccacctggccattggggaaatggaatttattacaaatcagctgtacaaaaatagatttgtgtgtttctgacagtgttaacgtttttatttacatgacaatattagtgctttgattgacatgaatctacgtgaatcttcaagttgtgtctctttgtttatccagcaatacgtatctaaaaacgtcatctccagtgagcatattgttgagagagaagcagagacatccttttccaccagtcactatacttccacagcccatcactccactactgtcacccagactcctagccacaggtatgagaatttaaaaattccacggcttttctctcagaatgaattgttgcacattgccttttgatatccctgcctaagaaaggaggcagtgaaatggatggtctttgggcagcaacagattttgaaaatcaactggctttgcccttaattcctgcataaatttgaacctcaattaggtaactccacagggccgttgtttcccattcctgagattgtctttactcatgccctgctactcaccgaattgctacactgggacaagtctgtctttggctctgcaaaatacttagaagtcaatttctttcagtaattggattgccctgggaaatgcacatgagaattggttaaatagtggaaccctaaattctcaaatgccctggtgatccccacctgagtgcacttactctaccaagaccaacactagatctccaaatgtagctcatacaaggaaatgtttctttaatctaagccactcaagaacagagagattataattatatactgaggagtggcattcgaaaatatttattgaatgagtgaacaagtgaatatactgtatccttacaaagccaatctgaatcaagatcctctctatagcaaattacctttgtggcgattctattcggagacaagtgatgttacagtgagctccgggtgcatcagtagtttgaaacatttgtcagaatccattcctttcatttccatttttttgcatataatttttgcacgaaatatctgattgtctctcccatttcctccgcagctggagcaacggacacactgaaagcatcctttccgaaagccactctgtaatcgtgatgtcatccgtagaaaacagtaggcacagcagcccaactgggggcccaagaggacgtcttaatggcacaggaggccctcgtgaatgtaacagcttcctcaggcatgccagagaaacccctgattcctaccgagactctcctcatagtgaaaggtaaaaccgaagggcaaagctactgcagaggagaaactcagtcagagaatccctgtgagcacctgcggtctcacctcaggaaatctactctaatcagaataaggggcggcagttacctgttctaggagtgctcctagttgatgaagtcatctctttgtttgacggaacttatttcttctgagcttctctcgtcgtcccagtgactgacaggcaacagactcttaaagagctgggatgctttgatgcggaaggtgcagcacatggagtttccagctctggccatgggctcagacccactcggggtctcagtgtcctcagttgtaacattagagagatggcatcaatgcttgataaggacccttctataattccaattgccagttatccaaactctgattcggtggtcgagctggcctcgtgttcttatctgctaaccctgtcttaccttccagcctcagttaagtcaaatcaagggctatgtcattgctgaatgtcatggggggcaactgcttgccctccaccctatagtatctattttatgaaattccaagaagggatgaataaataaatctcttggatgctgcgtctggcagtcttcacgggtggttttcaaagcagatactgccttcaagatggccctttattccagaatgttttggctttcctttggggagattgggttgggttgggggagttatagcaaaggtaaaatgaagaatggaggaaagtaaacaaagagatattaaatagtaatattgaattcatagattctctttctccattttcacctgagctggaagatgaccagtatttctagcccatcagtaagctgttacctgttcctatttgtttgcaagtctgctgggttttactttattttattgtcatctcaggctaatctttgaccatttactaaaaggtttacataatgtcaaatccatacttatgtggtagttacatgggaggagatgactttgatagagtctttccactcttggactgggaagttacttccaataaaataacacattctgggcttgaaggcctgttgcttacttttgcaagggcctttccttcaaaatgatattttagaactttgtggaatttatgaaatcagaggtaagctattacctgtttgtttgcaagtccgctgaattttattttattttattttattttattttattttattttattttattttattttattgtcatcttagtctaatccttgaccatttactaaaaggtttacataatgtcaaattcatacttgtgtggtagttccatgggtagggatgactttcatagactcttcccactcatggactggggagtacttacaataaaaaatgacaggctgggcacggtggctcacgcctctaatcccagcactttgggaggctgaggtgggtagatcacgaggtcaggagatcaagaccatcctggccaacatggtgaaaccccatctctactaaaaatacaaaaattagctgggtatggtggtgctgccctgtagtcccagctactagggaggctgaggcaggagaattgcttgaacccaggaggtggaggctgcagtgagctgagatggtgccactgtactccagcctaggcaacagagcaagactccgcctcaaaaaaaaaaaaaaaaaaaaaaacattctggacttgcaagcctgttggttacttcttcaagggcctttccccaaaaatgatattttagaacgttatggaatttatgaaatcagaggtttccctgcaaccaatctatgaaaaagtaggcagggtttaaactgttttaaaactttagtcttaaattcatatttttttaatgtattaaggaagtctatccattctgtttcaatcgttttttgaaacatgaaaaggaagttagagatgaaatcattcttcatcactacaagtgatatttatccttaaatgttgacatttccccactgtgctgggcttctagatgatatctaggactacgaaatattcctgaacctagagattatggagagaaaagatgaatcacttttatatgttggttgaatttaaattagcatttctcagagagcttaatttaagtacccccaaagccaaaagtttgaaggctcaaggcccacatatttcaatttctcaggcacgttcccagtttagaggcagctagctctcacgtctgtatcactgtgactccgggagaagcagggaggttcatacgttttccgttcctgttagcaagagttcagatgatggcattccatgtcatttcaggtcacgtcaaattagactctgtgaatgccagtgtgaagaaaagagtcatttagtgttgtgcgttggtaacattttttatcaaaagctgagaaatgtgactctgaataagccacgtcttcctcagtgccaaaagtcaggacttcttatactgggggaagaaagcatggtgtggtgaaaacagtgtgctcggtggcctaatggcaagagtcactgagcattatcagacataacatgatagaaggtaacagggtacagccaacccttgaggcatcatgaaagagattgaccaaagactgatatagctgtgggttttggaagagagatagaccaaagattggacataacctccattgtggtaactgtgaagccaaattaggttctctcaggcttacctttgactgtgtttgttggacactgggatggatagttccaaattgaatgttaactagttgcatttcatggaaaaaatgaaaagcacacaaatgtatgacactgttgtcaggaataaatctaagttactatgctctttttttttcataagacataaccttatagctgagctaaggagaaacaaggcacacagatccaaatgcatgcagatccagctatcagcaactcatcttagatcttcttccattccccatttgggcttcattctctaagaccccttggcctttaggaaggtatagtatttaagtaatacttctttcccttccgaatccctgagccttggtccttatataagctgagaggtttccaggacctaatgccttcttgtcttggctcatatgccattatttataattgtgatgagattgaaaatcccaaaagctttgatgagctaggcaatttagctgatctttgcatgcactcctgtgaggaaactcttggctacctaattttcgattccaagggtgtggaatttcctagcctaaataattaagcagcctacaatgaatagaaattctctgttctctgatgatataataccgtgaactctgtccccttaccttccctgctatgtgcctcttattgcaccacacttatgcagggtattctgtgctcacacaggtatgtgtcagccatgaccaccccggctcgtatgtcacctgtagatttccacacgccaagctcccccaaatcgcccccttcggaaatgtctccacccgtgtccagcatgacggtgtccatgccttccatggcggtcagccccttcatggaagaagagagacctctacttctcgtgacaccaccaaggctgcgggagaagaagtttgaccatcaccctcagcagttcagctccttccaccacaaccccgcgcatgacagtaacagcctccctgctagccccttgaggatagtggaggatgaggagtatgaaacgacccaagagtacgagccagcccaagagcctgttaagaaactcgccaatagccggcgggccaaaagaaccaagcccaatggccacattgctaacagattggaagtggacagcaacacaagctcccagagcagtaactcagagagtgaaacagaagatgaaagagtaggtgaagatacgcctttcctgggcatacagaaccccctggcagccagtcttgaggcaacacctgccttccgcctggctgacagcaggactaacccagcaggccgcttctcgacacaggaagaaatccaggccaggctgtctagtgtaattgctaaccaagaccctattgctgtataaaacctaaataaacacatagattcacctgtaaaactttattttatataataaagtattccaccttaaattaaacaatttattttattttagcagttctgcaaatagaaaacaggaaaaaaacttttataaattaaatatatgtatgtaaaaatgtgttatgtgccatatgtagcaattttttacagtatttcaaaacgagaaagatatcaatggtgcctttatgttatgttatgtcgagagcaagttttgtacagttacagtgattgcttttccacagtatttctgcaaaacctctcatagattcagtttttgctggcttcttgtgcattgcattatgatgttgactggatgtatgatttgcaagacttgcaactgtccctctgtttgcttgtagtagcacccgatcagtatgtcttgtaatggcacatccatccagatatgcctctcttgtgtatgaagttttctttgctttcagaatatgaaatgagttgtgtctactctgccagccaaaggtttgcctcattgggctctgagataatagtagatccaacagcatgctactattaaatacagcaagaaactgcattaagtaatgttaaatattaggaagaaagtaatactgtgatttaaaaaaaaactatattattaatcagaagacagcttgctcttactaaaaggagctctcatttactttatttgattttatttttcttgacaaaaagcaacagttttagggatagcttagaaaatgggttctggcttgctatcagggtaaatctaacaccttacaagaggactgagtgtcactttctctctgggggaatgatccagcagcttatctagttgacaatcaaaacacggctgataaaggtgcaatcatttctgacatgtatttttcactgattttgaagctagtgattggttgtgtcttcttggctcaaaaagaagcatattacggcacaaaaagcccagcccagacagcacatgcagcattttgtctgaaatacttctagagtcaaacgtgcctgctgtacatagcgatgacttgtcatcatagggaagtatttccatcgtagagtgttcagaaggagtgactgtataggtggagagaagcttagtgactccgttgaaattttaaaatgtggatgaccacccctttctcccccttatttttcttttatctttccatgttgccttgatcaggtcataactatgcatgaacattttttatcaggaatggccgatgtgtatgtgatttgtaatcacaagtaatgattcatcaggaaatgtcaatcctgttggaaagattgcacctttacttgcagaagtgacccccacctgtgtcctgacctctccatttacaggctctctcacccatttcccccacctcctttaatttttgctttactgtcataaagtaggactaagattggtctaagcactgcatgttcttttgtgatggtaaatccaaaggaaggcctataagtattaacatttgaaataactgctaattcaggaaaatggaagaaaaaaaattatttgaaacacagaacccatttcatggcctgcctgatatctgtgaaatcagggctggagctttacttaggattcacatggcctcctaggaaccatgggacaaatgggaaacaggttatcgggggattcatgaagtcagtgagagtaattgcttcttttttgcgggtgaactgaatgtatttcttcaccaaatcttgatgttaacaattaaaaagaagaaatgacatgcaagtaggtcttagcagaaaaatgcaggctgggcatgagtcatgttgttaccctcccacatgctcctacaatccacagagatgcctgtctgcaggttcttgaagttattgttagtatttggtatctcaaatttttcgtcactgttcacatgccactttctctgtgcacagtggtatcctcatttgctttttaacctacactgaggagtctttgtcaggttgcactgattttccaattctgcagtaatgagtaagctcacggcatggggaagaagacagtcagtccaatgaagttctctaaattattttaacattgcctttgaaggccttgactcatccttagctatttcaatgaagaaattcctaccatgaatttaaaaccctaaaaattctgtttcaaattctttgggcattggggtactcagatatcccattgtggaagaattttaagaataaatagaagtttctgttgagaaccatgagcaacatgtttcttacaatgagaattgctatgcattttaaaattgcaaatatatatgaaaattgaagacaagaggaaattgtatttctaacttgattctgatcactcacagaggtggcatattattatagttgggacatcctttgcacccttcataaaaaaggccagctgactgctcagcatcacctgccaaggccactagatttgtgtttacaggggtatctctgtgatgcttgtcacatcactcttgaccacctctgttaataaattccgacagtgcagtggcgatcggagtgtgaacttatgttcccagcatatggaaagctatcttaggttttaaggtagtagaaattgcccaggagtttgacagcaactttgtttcccgggtctaaaatcgtatcccactgaggtgtatgcagtggagcataatacatgcaaatacatgcaaaactccttttgtttcacctaagattcactttctatcttactttcccttcctgcctagtgtgacttttgcccccaagagtgcctggacagcattctagtttctacaaaatggtcctctgtgtaggtgaatgtgtcccaaacctgctatcactttcttgtttcagtgtgactgtcttgttagaggtgaagtttatccagggtaacttgctcactaactattcctttttatggcctggggttaaagggagcatggctcacactggtgaaaataaggaaggcctggtcttatcttgtattaataatactggctgcattccaccagccagagatttctatctgcgaagacctatgaaacactgaagagaaatgtaggcagaaggaaatggccacatatcacaagttctattatatattcttttgtaaatacatattgtatattacttggatgttttcttatatcatttactgtctttttgagttaatgtcagtttttactctctcaacttactatgtaacattgtaaataacataatgtcctttattatttatatttaagcatctaacatatagagttgttttcatataagtttaagataaatgtcaaaaatatatgttcttttgtttttctttgctttaaaattatgtatcttttccttttcttttttttaagaataatttattgttcaggagaaagaatgtatatgtaactgaaactatctgaagaatgcacattgaaggccgtgaggtactgataaactaaagaatttattattcaaaatactaagcaataagtaattgtgatttatttaaagttttgtccattttccatgaaagacatactgcaataaaaatgctactctgtggagacctgggagtgttgctcagcagactacagcttcagtctgttagaccagcacctttcatctcattcccatagttatgctaatttaggattgtgttccatggaccccatgatcaccttgtctatacgttgcttcttgtctgtccattgcttttgccacaccacctgttctcaaatcatctcctccctaccaatgctgtttatcactttcttccttgttgaagaggccacacaaccagacagtactatgcttcctttttcctccatacacaataacagagagagaatattctagggcatgactgcctggatcctggctgttgctatcttttgtagtggcagtaagaaactccttcagactaatgaaaatgtcaacgtgccattcaatcacgaaaggtaacgaaaaatgctctcatggttcaaatagtccaatggcccatagtggcctaaaaggcagccagttgacacctggccatgctaagcttccttataccatccgctaatgactttccattgggcccacaatttacggattcataattttaaaagaggagaaggccaagttaggttcattccccttattctgtcaataaaacaaatcaaactcatgtctatctaactgctcagggaggagcctttgcatgagaaaattctcatattctaagactgagtcatagaaatgagggtattacttttcttactgcaattaacctaaacaaaagccatattttaacaaatagatatttgcatggtacccttcatatattccaagcatttcactcattattccaggtaggttaagagcttctgaagtgtatgaagtaaaggtcagcaatcctttggggtgaacagtggcctcctttggagtttgggggtaacctgagacttcccaccaatgtccacctccatctgtgtacctaattcctattacctagttatggctcctctaggatcatttccaaacactctggatgtccaggaaatttaaattgtagcttttgactgagctagtttttcctatttatattaataaattttcaaaaatgcttgaaatcttcacatttgcaacaactttagttttcatgcacatacaaacacagagagacaaaaattccaaacagacactctccaaaagccaccacactctttcacttgctctatagtcatttagccaaccagccatgcagagaatatttaaaacttaaagattgagacattattctcagtttttgctgaggctttgtaacgaaattgaacactataagcagctattgtagtaattttggttaaaattgtttgcctgggatatagtatttgaggcagaagcacgtgtgtgaaggaggtgaggtggtttggaaagagtgaagactcgcagccagattgaatgtctggataattactataattctcccttcttggttgaaaccatgttctctcttgatttttaaacccaggctgcctctggaaacaagcaaacctgagtctttctaacctgagtcttcccaatcattagatttcttttctgtcctaacgatgaatgataaaaggacttgatgttcacaatttggggttataaggcaggtctgaaatctggagactcaagatgctggaaggagtggaaagtttcgatgactttatatgaatcactttgcactctatgtttggcttgtcctctttgaaactgatttactaaaataaatgtaagggaactattactccaaaagattaacttggcaggaaataccaatactttcagtttatgaaagacaaaactgtcttgttgctacaggaagctgcaatattcctaacctttaaggttggtgttgaatagggtggtcatgccctcccctgcaggtatctttaggctcctgttgacctcctggtactataactgttcgtcttctctgggtagctattgattttgaactttaacatgcttcaaaactttattcatcagggaaataggaaaagagttttgttacctggaggaaatctattgtgatctacctgagctttttaaaaacagaccaggagaaggaaaccagtaatttttaaagaagagacagagaatgggataatagtttcacccaggatctctttctaaccctttcccttcaaatgaacttattggaacagaattggaaagaagaaaggacatctctgcccaccccacaggatgccaaaaaggctaaagaattacctctgtagatttaaacatctttaatggcttatgtatagatttgctaatacagagagaaatgaactattaaataaaaatcacattttataatatttttatggcttaaaacatcctttatctcctttttgttctctctacatgatatggtaagtgatgaggaaaatttaggctcaggaaggttaaaatctttcttggagttacacatctaagagagctgcagagctgacacttgtacccaggttttctgactgcaaatccagtttctttctattgcgttcttcccctttccctgcctcaagcagaaacaggttttttattttcaacctttgtgtatacagtatgttatgttacatctacagctaagtttctttttagaagaatgtgagcccttctagctttggtttagagtgattctagaagccaatttccttggcttagtgattctatgcacctttcctaaacttagctttctaaggaaatgaagtgtacgagtgagaatgaattcacaatttcgacatgtaggtagcatcctaaagtgaaaagaggaggaaatttgtggtcaaagcactctccccaccacttagaaacttactgactgtgggcagcttcctcctccaagtttccttcctgatttacaagaccgtggtgtggtcaggattaaacttgaatacatgtaaggaagcctgaaagtgtctaacacatagcgagtattcaaatgccaccttctatttgatccttcccctccagttccttaagttttggaatctaggtttctcagttccaaatggattgacatttgcatatccccattgcacaatggatcaaataaactttatgttatcatttctccaacatagtgccagtaagcaaatcctttttaataacaacagtatgttgagaaacatatcaccaaataatatttaactttgtagctttgataagttctttaggttttggttttggttttgttttctgagacagggtcttgatctgtcacccagactggagtgcaatggttcaattttagctcactgcaacctgtaactcctgagctcaagtgatcctcccacctcagcctctcaagtagctgggactacaggtgtgctccaccatgcccagcgatttttttttttttttttttttggtagggacaaggtctcgctatgttgcccaggctggtcttcaattcctggccttaagtgatcctcctgcctcggcctcccaaagtgctggaattacaggcatgagccaccacccataactttatgtttgtttttttgatgcagtataagttcagcttgcttcttatgcagccataccatttcatgttaactctgatttttagcagcttattacattagtgttttattattaatataattttacagaaatttactaaaccatgactctgtagagttttaataatactacctccaaacatcattgcaaacatctagaagaatgaacaaaaatgatcttagatcgacagtatatctgtttgtcttagtttctacacacgatgttcagacatattccatttctttaaaaaaaaaaaaaaaaaaatatatatatatatatatatataggcctggcacggtggctcatgactgtaatcccagcactttgggaggcttaggcaggcaaatcacctgaggtcaggactttgagactggcctgaccaacatggtgaaacctcgtctctattaaaattacaaaaattagccgggcgtggtggcacatgcctgtaatcccagctactcgggaggctgaggcaggagaatcacttgaacctgggaggcagaggttgcagtgagttgagatcacgccattgcactccagccttggtgacaagagtgaaactccgtctcaaaaaaaaaaaaaaaaatatatatatatatatataaaatcccaccaaaagtctgcagagtgaccaaattagagggctctggtttcagattaaattctaaatgtgagaaaccacatagctcccatgatccatccaataattcctcacgtcctcttcactctttactccatgcataaaacagaatttttttttctcatcctgggtatgaagcaattaataatttacggatttagcctatttggattcaatcccttcaaactccatactacatccaaggtggaagtgacttaaactctgatatcaatcatcaggcttgtaatataggctttgttaatggcaggagagtctaataaaactttctgttccttatccttcatttaaatgaaaaactttttattgaaaacaatcataactctagctcatcataaatataattcatgaggacattttattatttttatattaaagaaataatattatagatgtaaactttgcacctttctaattattatcatgagttaagctaatacttgtcttctggtccctagatgatgattcttttttgccttactggaggagcccttgtcttgaagtgagttgcttcaacagcagaggacttctagtttctcccagttgagcctaaagtgaacttttcatcttcttcagaggaaggggcttccttgatttgtacttttgtggctcctcagataacacagacaattttatcttggatcccaggttctcttcaccattaagaataagaaagagagaaaatgctgtgcatgacagccacctactccaaactacccaaccccctgtaaccaggtaccttccaacaacgagatgattctgccctcactcaagagtctcccccacaaagattccattctccctttactttttattttttatttttttgcaaaacaaaggcctcctttagtacctccttagtttataacccttatcttcccagctcttcccttcactgatacctctgatttcaaaagttctgaagtcggaagaccacacaatttcagactgtgaacagaaattcagtcagaaattattggagttagaaagaatttagagaaattgtattgaactagaaagtcctctttgattagtggtggccctttagaaagttctagggcagagtcccatggtgtttcatcttttccatgatttgcttgaccaaaaacttctctttcacaacatgaaaatatgctaatccaccacacattttggattctgctctgtttgcctgaggtgttagatctctagccaggactgtgaagggaaggaacttgaatccttcctattgagctattaatgcagagtcagtgagatgaagggttccactcggggtcaaaatcatgtcagttaccaagcaaaggagcaagtaaggggaaacatctcctcatctggttagtggagccacatttcacccactgatcaagccagacctgagcaatagtctagatttctccctccacatctaattggtgacaatggtgattgtaccactgacaggtcacacaagtccacaccctccttcacagcctcactgcttcggctcttgtttatgctcttatcagcatctgtcactgggatccatttctctcctgactcatctacttcctttcactcccctgggccatccttcacatcatgctagaagactgtgtctaacttgcagaacttattgtgtcaatctcctggttacggcccctccatggctccccacctgacataggagacccttcacaatctggcttctgtcactcataacttgtctccagccttcattcttcagtctgattttatggttttctagttccccaatacaccacaccagtgtttatgaaaccctagtcattggcctacgaactttatgattattgacatattcatgtaccacctgtattattttttgcatagtgtttatttttaattgactacatttttaactacaataaagtaatttcaactaaaacttggtatcaatgctgcgaatggaaaactgctatcagttgccataataaaaatgaaactgtaaaaataaatataataaaaatgaaacaaagttattaagttctaaccagatactgttgcctgctcaaaggtctgagcaataagcctgttctctgtttgacacaaagggagttcagaaagtgttagagagatagaaaatattttggggaagcacagaaagatttattccctgagttagccaggattgagagggagttgatagagcagttacttctatggttttgttcaatgttatttaatgcttgatcctagaatcatcctgcatacaacattcagtcatccacatatctcaggaagcacaatattgtgcttgctacatatccctgcccttgttctgttttactggaactcccttctccattcgtcctcctgacaaacttctttcgccctctctctggataaagagagtttccttctctgggattccttccatgacctatttccaagtttccaggccttgagtgttccttcattgctatctcatagcacgccatacactctccaacacagcattttccatctatctcagaacttgtagttaactgcaactcctccctcagcagaccatccgttcattgaggacagacaaagacactgtcttatttgtgtatgcccactgcctaagacagtgcctggaacgttgtagacactggacatctacagaatgtatccctggcagcgagagactcagttgccataggttggcaagcacatgaggaatctaggggatcatagtgacctttaaagctaagatcaagaaaagagtaacctgtaaattgttacaacaaaatcagaaatgtaggagtagaaccaagcttgctaagtcatggtcaaaaacactataggtcagagttcaaggaatggaggcttcaaagtttagactagattttgcagtgaatgcatgagtactaaatatacctttacgcttgtcttggctccctctccacccaggaacccaagattaaaattaacccttcatttctcttcttcctccttccatcccctctcgcatcttctcaaggtctcaaaaataaagccctctagttgagcattcttcactaggtcaggttgtttttttttctcaacttttattttagattcagaggatacatgtgcaggtttgtttacatgggtacattgtgtgatgctgaggtttgggctacgaatgatgccattcactaggtagcgaacataatacccaacagacagtttttcaaccctttcaccccctagtagtccccagggcctattgttcccatctttatgtccatgagtacccaatgtttagctcccacttataagtgagaacatgcagtatttggctttctgttcctgcattaaagcccttaggataacggcctccagctacatccatgttgcttcaaaggacatgattttgttctttttttaatagctgtgtagtattccatggtatatatgtaccacatttaggtcagccttataaagaagatttccttattgaccgtagcatcaaacccaacctaagtgctcagtcctttgaagaggtacaaagatatccttgcatagaacaagcccacaagttttccagatgtgtgggttgagtaaaacatatgaaatgaacatgccgtataaatcagtgaaatatgtaatttgttattctggatagaatgctgatttgcaagactaagtgttcagggatattttctaggtaattccacttcatacgtaggcacagtataactatttgcaagggagaggaagggcacctaatattaccacagaagtcttcttttcccaatagtttgccagcctgaaaatgtagtcttctttattgattaaaaaaatctgtcaaattgtcaacttaaatgtaaggctttttgtttattggtttacctagtgattctaaagctaactccaaatttagttacccaaagattaaaagaatatagccgtgtggtttttttaagctttcctgtccaatatacaaacccagtttgccacctgctcatcaatggaattttatgtaactttcaactttaaagataattggataggaaatacctacagagctttttgaaaatttcagtgaaacggcatgtccctggcatggagttgatcacacctgcaatccctgccaatctgtgcttgtcagactcagaattagtctcctaggctgcctattcagtgatgcctgaaggtgcccacacctgggatagcagataccacactgctcgtgaccttctaaattccccacctaaagggcagcaggttgacaaccaggttgatagggttaagttttgtgttgccacccaaatctcatcttgaattataatccccaggtgttgagggaaagacctggagggaagtgattggattatgggggtgggggcagtttcccccaggctgttctcatggtagtgagtgatttctcacgaaatctgatggttttataaggggctctcctcccttcactcctcactctgctctcctcccaccttgtggagtaggctgtgtttacttccccttctaccgtgattgtatgttccccgacacctccccagccatgtggaatggtgagccaattagacctctttcctttataaattacccagtctccagtagttctttggattagtgtgagaatggattaatacagtgaattggtaccgcagagagtggggtactgctataaagaagatacttgaaaaggtgtaagcaacttcagaacggggtaacgggcagaggttggaacggtttggagaactcagaagaagacatgtgggagagcttagaacttcctagcgacttgtagaatggttttggcgaaaatgatgatagtgatatgtgcccggcaaggtgtcatagccccagcactgggaagtggttgacacgcgggttggtagaaagaatttaccaacaacagtataggattgaaaaaggaaagtttattagaaaggaagaatgctacaaaagggtgcagcggagcacctcagtgggaggactgagtgtaccacggtggattttttctgaggagcatttatggaccttaaggtagaagcttagggttatgaaatgagttttggcatggcattccagagatgcagagaaattttaattattatactcatccaagttgaaagaggcctggaaccagatgctgactttagatactagggaagtttaattacttcttacttttctagataaggagttttgcctctggatggtctgtttaatagttaccaggtggtatttgctcccttctaaattcctcagacaaggagtttttttctctggggcttgttcaatagtctccaggtgattttgctctcctcattttccctctgacaaatattttggtcaaatctttgaccctttatattcccccatgcctcatgtctacctgctgcctattggggtctcaagaaagggaaaacaccatagtgaagaggggcatcgagtctgtctggctacttgctgctgaaaggggagcactgaaggagataggttgtgtttttccctttcttgttctctgtcacgaaagcaattaagggtcatgaaaaactcgttcaagggtgggggatggggagaaactagattccatcaagaggccccacataaatggaagttactgttgtaggctggtattgggattgcatagtcacctgtaggtggaatctctgtaatctggaagatacaaacttagtaaaagcagtaaaaagtaaggaccaaatatcaaaagaatgacaaggaacaaaggtccaaggaatggaagaagccaagtgatttttggaaaccaatcagtaacaggtttgatccactcttggttactttgataaagtgtatgtaaccatctggcttgtttgaaaatgtcttgaacatcagtctccacttctccagacacattaatgtaggtgcaacaggttttgttgatgacagcacagtctcctcctcattcagctaggaggaaacacagagcttgtctattatcaaaaaccattcctgctagtgagtctaaagacttttgtatcgctgatatacttgcaccaatttttgctaaggctatttcaagggagatggtaagttctagtagtatgattttatggtaagtaaaacctgcccgaggagcaagagttgcaatagtttctacaactctggccacaatatgttctaggcccctttgtcctcttgaatgaaattctgagttggaagttatgttcaggacagcgatttaggtgggagctattgttcctagagtacaatcaccataatgaagagaatgatcaaggtgggtaatattgttagcctttgtgtccccacccacatctcatcttgaattgtaatccctgggcgtttagggagagaagacctggtgagaagtgattggattgtgggaacggttttccccatgctgttctcatgataatgagtgagttttcatgagctctgatggttttataaggggctcttccacttttgcttgccacctgccgcttcgtgaacaaggtgccttactttaccttacaccatgattgtaagtttcctgaggcctccccagacatggaaaactgagtcaaattaaacctttttcctttataaattatccagtctctgatagttctttatagcagtgtgagaacgagccaatacacaggtattgaaatatgaacaacccaggggcttgtacatggttaaatctataaagccggaacatctgtgctccaaagccaggtcagtgctttatttatcttataaactcacagtccaaaagattcatagagagatcctgcctctacaaaaaatttaaaaattagccagtcatggtggtgtgatggattcctcttggtggaatctagtgatgggcctgtggtccaagctactcaggaggatgaagtgggagggtcacttgagcctaggaggtagaagctgcaacgaaccatgatcacatcactgcactccaacctgggcaacagagtgaaaccctgcctcaaaaaacaaacaaaagattcagaataaaccacttagattagtataactcttttctttgaattcacaaattgaggatgtaaaatgatcttgtccacaattactcagccaataaaatgaagacctgaagaggagctgacagctcctcagctattattaggccatgtggctagtcatctttaaagcccctgaagaaaatccagagagtagtaacttcctgctctttcttgctgatactcatgtgtcagcattccatgttggaagctgacaaacattgtgcagctttctctagaatttgcctatgttatggtaaaaggaaaatatggtataaagaacacgagctctgagaccagtgagatctaggcttacatccttcctctttcacttggacaatttgggcaaatttacatccttgagcttcagattcactgtagggtttacatttgatcatttttttatgcaagctttagtacagaatgccatatagtaggtgctcaataaatactatgtcctcctttggggcaattttcttgtgtaggaacactagcttgtctggcaaagagaaagggataggcactgttcctgagcttagcagcctcactgattatggctggtcctgcccttcaagctcccctggggaagccaggcaagaatgtgtgtcatcaggaagctggggtccaggctctgctgccaggatggaggcccattttattccccctgctacctcaaaacataagagtacaaacttactcagaaccgagttagcccagtagaacagatgtttcattttccttgagaacaaaacaattttatgaattcagaaatggaaataatagtttgcttcatctaattagcaggagctaatttagatttcaaggtcattgtgtacggtgtcctcctccttcacatgcccagcactttggctctactccctccctgcttctgtgattcagcatccatgcacacaccataaacaatcacaatttccattttaggatttggtctcctggtgctgtgctacagcccccgtttttaggaaattggtgcttggcaaacgatgaaaagtttcacagaatatgaaggttatggcacagttttctcctgcctcatggcttaatttaattaagtattctgtaatagctctgcagcagacttgtgctgcggaatgggctccaatttgccctatggcaactgcaggagcagagcaactataagatatgcaagatgactcatcagctgttggaaaatgcagtgaaacctttgccttttcaacaggatcaggcaaggggactgagacagcatccctgggaatagacacctggtaactcagcatctacaagatcattttaaaacatgcttacagtagagtaatcagcaaaaccactgtctgaccttgaaattattctatggctgctggaccttgaagacactgatggaagcagctaagtccagctgtctggaactttgatcaactatgtctgcccccctcagtgtagccaagacctcccttacagcaggttctctagggcaggaggtgtaagcagagaagtcaggagaccaagatgctctttcttattgtggcagataccgagtaacctcatgcctttgcaggctttcggctgtgagcaaattctgatatttattatccttactggggacactcagcttcacagattttgtttttcaaacatgaaaaaagaaaaaatcgaggccctgaagtcacagaatgttttggcagctatgttcaggcttgatagaaaggcatccccatggggacgtagcttttgtctggttccgtttaatttgctatcttcagaagggaaagatggagagataaccggttgggtggggctatgtgatggagattttctgttaagatggaaatgaggggagctttaggtaagtgacagatgacttcccaagaaactgcatgtaactagtcatgaacaacgttgcaatctaagacacaagtgacagaggtggcctaggaggcaatgctcacatgtagtcagtttgtacagccatattcccttgcaaggttgtaaaggggaccactctgtattactgctcatagccatggctacgctgtctgcctattagatgtttaagattttttttttttttttttttttttttttttttgagacggagtctcgctctgtcatccaggctggagtacagtggcaccatctcggctcactgcaagctctgcctcccggattcacgacattctcctgcctcagcctcccaagtagctgggactacaggcgcccgccaccatgcccggctaatttttttgtatttttagtagagacggggtttcaccgtgttatccaggatggtctcgatctcctgacctcgtgatccgcccgcctcagcctcccaaagtgctgggattacaggcttgagccaccgcacccggccaagatgtttaagaattaatctccagcatttcctgcagcccttccaaaattgatcctccaagaagattcatgcaaacctcattcatttactcaaagctcattctttcattcaacaaacttacactgagtatgtgtgataggcacaacactgggctaagagtcggggatgcaaagagtaaaatgtaaaatgtatcttatttaaactcatctaatccttctaagagaatacattctagtgctggagattgacacataaactacagcaatgtgttctggatactgacacataaactacagctgaggaggttgtgcttccgtgaaaagaacataagatttagaatccttagtcctatgtttattaccaacttcacccataggtgcatgtaaacctaaccttgacatattactaaacatcttggagcctagtttatctacctataagagttgaacaatcttaaaaggatattgtgatggttaggatatataaatatatatatcagtgtatatatataatgatcatatcttatatatatcacatataaataggattatgaaggttatggcacagttttctcctggcttaaggcttactttaattagatattctgtaatagctcagcagcagaattgcactgcagatatatatatacataaatataatattaggttggtgcaaaagtaatcacagcaaaactggccatgtgaatatatataacagagcaattgctcagttaatagttttaatgaaaatttaaaggtccagtgatgataatatcacaaagtgccacaaaagcacagaagaggcaactactgtctgagggttataatttcgctaggtttgaaaagaattgttgctcacccaaccaagaatggggtaaatgttattaccgcaaattatttttcatgagaaaatgcccagagaagtggaagagcagggtcttttcaagtaggtgtggtggtaggtagaattagaagtggattcaaatatagggctgatgtagctaactgggactaaattttggagtaagttcattgtgtccaccctggaggcaattaataagcatgttcagaaatgggatttataaaattgattctggagaccaggatgctaaggcaatggagtagagagggagtgggagagagcaagatggaatttagaaggtgaaggtaatgttgtacatgagtgatgatggcctgaatctaatatggattcgtggcaaagaagatggagagtagaaaatggagtggggaggaatttatgaggtggagagaaagccctgatgactaagtggacgtgtggtatgaggtggtagaggatccaaggatgtcattgagcctgggctttggaaaggttgccaacatctattctaagaagttggagaaaacactcttcatgcacttatagaagtccaagaggtaggggctgagacaagcccaacaccctattcattggctcagtcagatcctgatagtagctgtgggctattcatgttgtactgtgctagcattgcatggatatcatcacctaatctttagagcaatgctatgaaacaggtattatcattctcatactattcatgaggaaactgaggctcagctgtgttaggaatctaattgcatacaacgagcaacccttggagttggaaatcaaccgagatttgcctgataccaaaggccctgatcttcaccacttccctctatctgttcctcctatagagatgtctaccacataggactcataaagaggatcacctttttaagtgaagctcatgcctctccaccatcatagattatttcccttggtgtaacatgggagaacaaattctgactgaagccaggttgtctctctctttttaaaattacttatttatttttaatttttaatttttgtgggtacatagtaggtgtatatatttctcttttaagttatttataatagcaacatttgacgtagggataaaactcactgtccccattatctgtattcattcattcactcatttaccagccaccatcagttggtagcattccaccaatgctttctgctctcctggcactgtgccaggctctgtgtccactatttcaagatttatttttttaatttttatttatttatttttcagacagactcatgctgttgcctacgctggagtgcagtggcatgatctcagtctactgcaacctccacctcccaggtcccagtgattctcatgcttcagcctcccgagtagctgggactacaggtgtttaccaccacaccaggataattttttgtatttttggtagagacggggttttcctatcttggacaggttggtcttgaactcctggcctcaagtgatctgcctaccttggcctcccaaagtgctgggattacaggtgtgagccaccgcgcccagcttgaagatttctaaggtgtttctggaaagttaccctgctgactgtcctcatcttaccatcttttatggaaaaacatttccctcttggcattctgggagttcatagaggaatgaaacctttccatgttcctccatttctgacattgttggaaacgttgcaggttttatgttttgttttgttttgagacagagtttctctcttcttgcacaggctggagtgcaatggcatgatctcggctcaccgcaacctccacctcctgggttcaatatattctcctgcctcagcctcccaaatagctgggattacaggcatgcgctgccacgcccagctaattttgtatttttagcagagacggggtttctccatgttggtcaggatggtcttgaactcccaacctcaggtgatctgcccacctcagcctcccaaagtgctgggattacaggcgtgagccaccatgcccggtaggtcatttttaacttaacatttgaggagctgtgttgacacatgtcctacccatcagtcttcagggaaattaaggttttaatttcaatccagcctaaacaggtagtggtaaactctccacatcagggaggaccaggctggcctgccagtgggttaggatgcttcaggtgtgactgtttcatctacggaatatggtggtttgcagaataagtgttactggatagttctggtcacccagatactcatgcctactttgcaaattagatttactcccaaagtgagcgtactaatggaaagcagtttgtatggctatcaaaatacagtcactactacagacaacagggtaagcctgcccatcatgaatgaaaaatcacagacctcagagttgaagatcagagggtagctaaaactttcttcactctaaattgatagaatttttctacaaaaatcagatcattgcttttctcttaggttttcaaattatctgttgcagcatgcaccacattatattatattcacatttatggctgacttccagctagttgtgagctcatagattttagagattatgctgggttcacctttagccctaatgcttagcactatgcctggaacttagaggatcttaataaatatcattcagagctactactttatttatcattgttaacagggaagatcataggactctacagaaaaaaaaaaaaaacaaaatcttaattcattcaaggtccttctctgtactagtcttaaccaagatgaatggtaaaagaatatgtttgcagcagggtggagtggatagttttataaatgaagatggattataatattatgatactgttgttttattatatatctatcataaaagaaaataatcttactaaagaataatctttggtcctttcaattaatgtaatggagactctcaatttagctggaagagagattcagtcttgcctgggcatgtctctggaattggtgggagcagctgccagaggctgtttgcatatggattgaaggtcctcttgggagagttctcattctgaaggaagaagttgcctggcaacaagagtttgacccatagagacagccttacccaacagaggagcaaggaagcctgactactgtgtgatgtctgtcacctagatccccctcccagcaggatgacaatttatacctaggagctatagagagtagagggtttgaatgtacaaagtgggggaaaataaacttgcattactaatcttttttaaaagagtggagtacaatgccatgtttcaggatctatgtgataaactgaaacataaatagaagggaagcatccctgcttttttttttttttttttttaactaaaaacagtttgggtatggtaatgtcaccaaagcattcatgacaatgcatggcaaaccagcaacagtaccaggaggaagactttgaagcccagtagagcatgaaggatagacccctgtaggatatgatagtatccagatgatactcattggaacatggatacacctagaatagagtagcagacagagtgacaaagtgatactcagcagaggactgagggggaacagttgcacccagtggaacagtgagtggatggaaaataatggtactagggggtggatgtgaagcagcatctttgtctgggataatacctgaggttcgtggtctcacgccaagaagattgaggacacggacacacacacacgaatgagtttagaagctgaggtttaataggcaaaagaaagagaaaggaaaacagctctctctctgagagagagagagagagagagagagagagagcgcgagccgccccagtgggaatcccagcctgcctaccgagtgcaccagattttatacagaggcttgaggaggtggtgtctgatttatgaagggcctacagattgattggaccagttgtgacgtttatatagagcgtggggaaggctggctgccccactccaatcttattatgcacatggacttttcacttggctggcgccatgttgtctgcttcttactgtacacttggctggaaaggagaagggaagacggagccacaattttgaacatgcctattcccaggcagccttttcctactggcacagctgctggcattcacctgtgcaaggttctagcttgcttgtctatgtctgcagctggattttacaggctgttctttgttagaaaagaaaatgatttgggggctgcttttcattaaaaggaaaaccttaccctcactatctgcctaaatgatttcttcttaactcctgtatcagatgttgatgtcaaagggggagccatcaaaggattttagagctctactataagcctaattgaactaacaactgctactggacttaacgagatcatgaatctctagtccaggatgttagaaagcctgcatcccatggccgtgcacaaaaagtcactgatagttaacttttcttttccaaatggaatttttttttgttcaatgtggtgctttctttaaataaattctttcacaaactgaggaatcctacattaattcaaatatttaattcatatgcatgtgttttctccaatttagtcccacagggaattcagttagcttataagaatgcaaacactttagcaagttttaacaaattcagaacaagtgaaacaactacacttaatctctctctactttatttaaactttaaattgggatttcagctatagcattagtataagatgtatgtgaatttttgtttccatagcttccaagctctttggctgttcagtatagtgtttatcataacccccactattgggtgagaaaagccaatttaagagactgagatgctaacactcaaagagggcaaatgacttcactgagttgtacccaaaattgctgtcttttcctaacaggttttttttcttcatttccttcttttgcctgatcaaataacacagagaaagtggtcctatttagtaagttgaaatacctctctgatacccaatgcaatacccaataagtgtacattgtgccttatggaattgacagatcgctgcgagggccaggtgaggcagtgactgagctgcccaaaacaagtgtcagtgagtggccacattgattttaagagcctatcaagtaagcataaattaatcatgaaaacaatcaagtttaaatttcagcttgtttggagtaccaatccttgataaaaaaggggtgggataatattttttccttgacacttgggcttcccattgaacttgagttactttccacctaaggggaagtgttatgcatttttggaacagaacccagatcaatgcaatatagagtgtattctttttattggtgttgtactctttattgtcaatcctggaataccagatctagaaataaaatgggagtagaattagaaggaaactagaatgatcaaattccatctgtataacaggtaatgtcatacagtattttattttgtgtgtataattttgagctttatctattatttatttattttgagacagggtcttgctttgtctcccaggctgcagtgcagtggcatgatcatggctcactgcagtctcgacctctagagctcaagcaatcctcccaccagagtagctgggatcacaggcatgtgccaccacacctggctaagttttcgttttgcttgatggggatgggttttcaccatgtttcccaggctggtcttgaactcctaggctcaagtgatctgcccatcttggccttccaaagtgctgggattacaggtgtgagccccaagctttactattttatctcttcataagctactccaaaggttagtgacatgtattacccggtaatttttgaatcacaaatgtcaacactttcagggtttgcaggaaccctccagctgatgagtgagattaatcagagcccaccatccacatttcagtgatttcgttctatttatgtttgcatagcattttataatataaattacatgttctaatagtattttaaaatttgactatacctgaagtgctctgaatatatctttcaaaaacgtcaagactatatggaactatggaactatcaaaaagatgtctgaggttgaagccacccgccttttattttattttattttatttttttgagactgagtctcactctgtcacccagcctggaatggagtggcgccatctgggttcactgcaacctccgcctcctgggttcaagggattcctgtgtcagcctcctgagtagctgggactacaggcatgctccaccatgcccggctaattttttatatatttttttttcatagagatggggttttaccatattggccaggctggttttgaactcctgacttcaagcgatctgcccaccttggccacccaaagtgttgggattacaggtgtgagtcactgcacccagccaaagctaccctcttaataggagttggagtttatgtctgtttgcttcctaagaccacactctttatatcaaaatgtgctacctgcttggaggtatttttgcatattatgttcaagtttatgagcaaaataattttaaactctgcttacagtaaagtagttagcaaaaccactgtctgaccttgaacttattttgaaggatgttttagttgatgggaccttaaatcactgttagaggtggctacacccaccatctggcaatatgaaaagcaatttttgccttgcaaagtgaggtcaggatctaagccaagagacaacttgtccagggcacaaggcccaaaaagagcaatcaggagacagagatgttcttccttatctggtaaatgtgagatatctcatactttgagttagggatcaattcagatacacccagattctgacttcaacatcctgccatggcagtcaaacgatactctaaggttaacatttttaaagttgtttttcttgtttttttgttttttgtttttttgagacaggatctcactctgtcgtccaggctggaatgcggtgctgcacctgtagctcactgtaacttcaaacccctgggctcaagagatcctaccacatcagcctcccatacaactgggactacaggtgcatgccaccatggccagctaatattttttttagtagagacagggccttgctacgttgtcccacctggtcttgaactcctggcctcttgaagctatcctcccagcttggcctcccaaggcacggggattacaggtgtgagccaccattcctgaccccaaagttatttttctgaaaggaaaacaaagattacccttagagagtttagggtagcttttcaataattagctactcttgaagatgactgacattctctcaaatgccatttcctcatctttcccatgtctgtcagtcacattattataacatagataactggtgtggggggaatcttactggtgatagtccagtgctctttatgacacattcacttctctaacccatggagacttccataggatgctcagtgttatcctagatcacaggtgtccctgtcctgatgtcaggttaatgaaggtggcttgtggacttggatatttctgggaaattttacaaggggtaactaaagtaaaagagaaagaaatgcagaaaaatagaaacagaaattctcaccatagaagcttcattatgtatttgcaagatattcacacactctagattttctaagacagttctgaagttaaatcaccttattcttaaaaatatgatggattatgcttatgtttatttaagtgtatatacatctgtgttgggtattcatgtgtaacattttagagctcatattttcatggctgtctagttttctttttcttttttttttttttttttgagacggagtcttgctcttgtcaaccacgctggagtgcagtgatgtgatcttggctcactgcaacctccgcctcctgggttcaagcgattctcctgcctcagcctcccacgtagctgggattacaggcacccaccaccatgcctggctaatttttttgtatttttagtagagacagggtttcaccatgttggccaggccagtctcgaactcctgacctcaggtaatctgcctgccttggcctcccaaactgctgggattacaaatgtgagccaccatgcccggcctgttttttaagagacagagccttgctgtgacacccaggatggagtccagtagggaaatcgtagctcactgcagactcaaattcctgggctcaagtgatcctcccacctcagtctcctgagtagctgggacaacagtcatgcaccaccatgcctggctaatgtatttgtttattttttgtagagatagggtcttgcttaattgcccaagctggtcttgaactcctggcttcaagtgattttcctgccttgacctcccaaattgctgggattacaggcgtgagccactgcattcagcctgctctctagttgaatgacttcaggcaagatactcaacctctttgatcctaggtttcttccttattacagcatggagactactacctaggtaatatggttatcgtgaagagcaaatgagaatcagactaagcacattgtagatattcaacaagtttacacatttgaaaatgtccagaaggaaatttatcacaagtacttgtcttcattggatagtgagactatgaatgcgtggcatgtgtatcccaggctttcctagcttgccaacacaagtgacaactaatttatgttaacaacactaatggaaacttagtgaatgcttactatcagccaggcaccctgctaagctctcctcatggattatctcagagatcaaccagatcttactggcttgtgtcctcagctagttgatcaaaatttagttttatccagatcccaaatattttggagacttcccagtgacatatttacatgtccttaaatcatttttctccaaattctacttgaccatttgaaaatggatatatgatcctcaaagctagatcaatgcccagtagttttccttttttcctaactcctaatgggtgctgatttcatggagtcaggagcccctgatagtttgaggtttctaaagtactgctgcagccaaggttaagcctgggatttggcctcgctcactattaacaactgataataaaatgcaatcagaaatccccaatgtttctgttgaaggatccagaattctagcaaccctaagatattgctgctgttgtgctggggattggtagtccaagccccagccatcccaccaggttgtagctgcagttgaaaagtccactcctaaggtctgttacacccaggaaatcagtgtctgggtccaaaggatcattggtggtacacttcttttagctcatgaacacacacaccccatgcatacacttaggcaaatggtgcacacacacacaaacacacatacaccatgggcatgttccccaaccccacacatagttcaaaggaagatgggttaaaatttatctgtgcttaccttgtaactgattctagattacttagttctgagcttatgtgttgctttcaggccttcttggtctgttccatttgctattccagcaactgacttcctttcaggggtttcactgcctttttcagtgacccctcctgggctgggcctacatagcccatgagacatagattttaccctgttaattttttaacatagttggaatcactatcccattccatatttcaccaggggaatccctagttccctatgtaaatatcaggatgtacatggatgcttgcagaggtgagaagggtgctccccagtttcagtcaccagctgcaccaatatcccaaaggcagatgcatgtgttaaataaaaagtaatgacaactaacagtgaagattctttatttttgaagcatttttcttgtgataaaaaaatagcgactcttatcatagcttaggcctgatttttacaattttaactgaaggttgggtggctctgtggctcatgcctgtaatcctagcactttgggtggctgaggcaggaggatcacttgagcccagcagtttgagaccagcctgggtaacatagtgagaccgtttctaccaaaaacttgaaaattagccaggcatggtagcacgcacctgtagtcccagcaactcaagaggctgagatgggaagattgcttgagcccaggaggttcaggctgcagtgagccatgattgtgctacttcactccagcctgagtgacagagcgagaccctgtcttaaaaaaaaaaaaatagccactgagtttaatcataagagggtatggaaattcacactctcactttggtgcattgggaaaaaagctctctaacctactccattaccataaacagagaatccgttcctctggtatgtttcaaatgatcttacattatcaatggattgattaacctcagtaatgatttgttggacggccactattaataataaagacttttaaataactccttgtttcaaaataattattttttcacctttattataattatataaagaagatgtacccattttatgagtacatttcagtgagttgtgacaaatgttagcacctgtccaattatctccctagtcaagttctatagcattgctgtcactccctatcttagtccattcaggctgctataagaaactaccataaactaggtagcttataaacacagtttctctcagttctggaggctgggaagtccaaaaactgggtgctggcatggttgggttctgatgagaaccctcttctgggttgcacactgttgacttctcaaatggcagaagggccaaggcagcttttggagtctctcttacaagggcattaatctcattaacagggctctgtactcatgacctaatcactgcccaaaggccctacctcttaatgctttcactttggggatttggtttcaacatatgaatttggtagtgaggggtgggccgggcacagccattcataatatagcacctcccaggccaggcgcagtggctcatacctgtaatcccagcactttgggaggccaggacaggtggatcacttgaggtcaggagttcgggaccagcctggccaacatggagaaaccccgtctctactaaaaatataaaaattagacaggcatggtggtgggtgcctgtaatcccagctactccagaggctgaggcataagaattgcttgaacctgggaggcagaggttgcagtgagccgagatcatgccactgcactccagcactccagcttgggtgacagagcaagactctgtctcaaaaaaaaaaaaagtaaacaaatatatatgtatatatggcactgcccaaatccccctattaacctgtcatctaggttttaagctctgcgtgcattaggtatttgtcctaatgctctcccttcccttccccccaaccgcctgacagacctggtgtgtgatgttcccctctctgtgtccatgtgttctcattgttcaactcatttgcagtcagtctctcctaagcacatccactaatattatttctattactgtagattggttttgcctattgtagagtgtcacagatatggactcatacatgaagtatcctgtatttggtgtctttaattcagcataatgttgttgatatccattcatgtgtttgtgtatgttaatagttcatcccttttattgcagagtagtattttcttgtgtagatacaccacagtttgtctatccattcatctggtgatggacatttgcactgctttccacttttcagaagctgctgtgagcattcacatgcaagtctttttgtggacatatatttgcattttaaaaatacctaggggtgaaaccctaagtcctgtggcacatgaatgtttaacttgaaaaacactgccaaattgttttcaaaagtaactgtgtaattttacacttaccagcctggtaggacagttccaatttcttatcagcacttattattgtcagttttgtttaaaaaaaaattctagaaagtatatagtagtattatgtggttttaatttgcatttacctaatgatactgaacgtctttccatgggtttatttgccaccaatatcttttttttttttttacaactctcaattttacttcaacaattacctggatatcaagtgcttgaataaaacttttagtaatatttaaatgtttcagatacaatttgtcttataaatttacatatagaaaattataattttgcattctattttctggaagatttttctttttccaataaattttttttttggggggatacgtttgtagaatgtgaaggttcattacataggtatacatgtgccatggtggtttgctgcacctattaacccgtcgtctaggttttaagcccggggtgcattaggtatttgtcctaatgctctcccttcccttccccccgaccccgtgacaggcctggtgtgtggtaatcccctccctgtgtccatgtgttctcattgttcaactcccacttatgagtgagaacatgcggtgtttggttttctgttcctgtgttagtttgctgagtgatggcttccagcttcatccatgtccctgcaaaggacatgaactcattcttttttagggctgcatagtattccatggtatatatgtgccacattttatttatctggtctatcattgatgggcatttgggttggttccaagtctttgctattttaaatagcgctgcaataaacatacgtatgcatgtgtctttatactagagtggtttataatcctttggggatatacccagtaatgggattgctggctcaaatggtatttctggttctagatccttgacaagtcgccacactgtcttccacagctgccaccaatatcttatacatggtgaagtctattcaaatcttttgcctacttaaaaaattggaatgtttagttcttgtattcagttgtaagagttctttatatattgtagatacaagtcttttgtgagcatataaattagagctatcccctcctcacaaagtaatgacagttttgttatttaagcctcatagcaaaaatactacatacagctaatttatgtttaatcttttttatatttccaaaatgtatataatagaagatattaactttattttttaaaaaagaaaaactgatcatcagacctttgtttccacactttgcttcaaaaagtgtgcttagaatacatatatgacttacctagagtttttttttgtaatacccgccagtccagaaatagaggtggagaaagaaagatgacttcccagcaaagctttgacatatgcaaaatgtaacttgaagatgcagtatctctttttttttttttcttggctccctaatgtgatgtgccccttccccaagtgctcctatcccagaagagtttaagcaggcttctttccagggttgttattgtatttttttggatctatcaaaagatttatagcagcagcaaggccaaatgaaggaggaatttgtgggtctgaggggccttactgagaggccctgaggtaacactatattgtaatggttcaccttacttacctttaaagaaggttttaaaaagagtaaatcagagctgggtgagttaatgttagtgaaggaatacagcagctctgtcacatgggctccttttgtaggaggtatccttaggcttcgtttaatttcgaattggtatgcaaccaagagtgcctcctgcatctctgagtgtctccactgtggagtgccctggtggctcatgagaatgcattaaggggcaatccaggtgggtggcaagacaaggcaggactgttcacactacctctcttgccccatcactttacagcattcttgtaccatcttatttttctccagtgacataaagagcactctgccttgctttgtcaactactgaagccttgtaatacctatcaagacaataagtgagggagagcatttgaggagctagagaagagagctgaaggaaaacagctactaaatttagtaagagaactggtgtgacttacatgagatatagaaaacaggcaaacccatagaagcagagagcagaatggttgttgccagcagctgggggacaggggtaaatggggagttgctattcagtgggtataaagtttcagttgtacaagataattgagttatagaaatctgccatacaacattgtgcctacatttaacaacattgtatgataaatacagcattatcaatatattgaaaataaagacagtagagctcatgtttagtgttcttaccacaatagagagagagagagagagagacagagagaggggagagtgagatataaagagagcttttccaggttttagtttgtgagacatgatttgcttttttaattggagtttgggatgaagaagaggaaatttggggttcctgccaacgtatgagagaagaaaaaaatagcaaaatggaaaaaaagataattttaagaagatcttcatgagtgtgcataaattatgattcctttttgacctgtctaaaggcttgatttgcttttctattactttctagttccagggtggtgttactttgtgtgcagttatgatactgagtggtggttcatgtttatacagtttgtacttggaagccatgagggtgtgagattctttgggaagacacatctcacttttatctaagaagttttgaaaggatgccaatgttgagttaaaagataacccctactgtgggagtatgtgtcagtgatttcctcactcagagttcttaggaccaaattaaactccaggagatggtcatgtcacttgttgaaatctcaggcactcttatcaggacctcttaacctccctatggttggagcatcttctactgacttatttaaggttattagtaggaccattttttggaaagatgtcctgcaattcaacatgtttgtaatgagacataccaactctgagtcatcacataatggagatttccagaataattggagagaatttgggttcctgtcagttagatagtatttgattctgtagaaggagctgactcttgctgctatggtttcaatgtgttccccaaagttcatgtgccggagatctaatccccaatgcaaccatgttgggagatggggtagcctagtaagaagtgattaggccaggaggtctgtgttcatgaatggattaatgttatcataggagtgggtttgttagcatgagtgagtttttgtaaaagtttggccctctcttgctttctcactgtctccctcccttaccctccaaccttccaccatgattgacacagcatagaggcccttgccagatgccagtgccatgctcttggacttctcaacctctagaaccatgtgtcaaataaatctctgtttgtaaattaaccagtctgtggtattctgttatggcaacaaaaaacagactaagacacctgtggagagtacagattgattatggatgaactatctctacccgtagagaacaagacagaagcagtagcagtcgctggtttagaatgtgtatcaggcactgttgggttttgcccaaagctcctctgatctcttttcagcactgtggtcctatgccccggtccttgctgctaatggctaatagctaatggtatctatttgcaacttccagaacattgctctgtgggagtttgctttcagattccctttccactttgtgttggttcatagccaatgactgaatgtcacgggagtaaaataacccagctcctggaacagcaaactccagggttgaatttatgctagtggtctctgtgagagcaggctgaggctggagtttcaggatcacaccttgtttggtttcatctttccttactctgcttttctggctccctttttgatttcttctggaagctctccctcaataaattactgcacctaaatttctgactcagtgtttcctcctgggacaacacaactataaccagaatggtgaatgtcttggagatattgaaaaaagccagcagaaaatataagctgtttgttgttgctgttcttgtatcggtgtctcatgggcagtatgtgtccacagtcgtatagaattgtcgattttcaaggtttcgtggcgactctgtccaaaagaactgacaaataatcacaattaacctggctctgccatgtaagcatagttactaacagtccactgtttaaattttgaaagcaaagattatgcattatataatttaagagaatcttgttttgagactgagccaaagtaacacaatttattatatcttaggattataaagaaagaaaatgtaacaaatacatggaagataggatgcctaagattgagaagacttcagttcttatttgaccattttaggaatgcatgtgatatctcaagtttaagaacttaaaacagaactaccatttgaaacaacaatcccgttactgggtatatacctaaaggaatagaaatcgttctaccataaagacacatgtacatcacagcactatttccgatagcagagacatggaagcaacccaaatgcccatcagtggttagactaggtaaagaaaatgtggttcatacacaccatggaccactgcacagccataaaaagaacaaaatcatatcctttgcagcaacatggatggagctggaagtcattatcctaagccaactaacgcaggagcagaaaaccaaatcccacattttctcacttataagcaggagctgaacattgagtacacgtggacacaaagaagggaacagtagacactagggcctacttgagattggagagtggagaaggataggtacctattgggtacctatgctcattaagtgagtaacaaaataatatgtacaccaaacctctgtgacacagaatttacccatataacaaacctacacatgtaccctctgaacctaaaataagttgaaaagaaaaaaaaatgtaaaccagtaccaattatcacactgaaaacaaaatcttttgtaaacattgtaacactaataaaacttgaaggtaaacaagaaatagatttgtctcttcttattaagaatttcatcctactgagattcacaaacacactaatatattaccttatcttctaatgacttcagggataatgattttatatatacatataggattgttattgttgtgagagggaaggaagttaagtaagagcaatagcttagtttttgaaataaaagtttacaatgtttttactcctggtaaagagaagttttggaagaatcactggacttatttatatcgataattctaaattatctttgttatctgaaaagtaaatagttgttatttaagcattaaaataaaaagcaaatgcaagcttctttatgatttaatctagtgaatagttaccaccttcctgggtatagtaactgattcattttttactctaaatgaagaggcagtttctgctggagagaattactggttcatcatattacatgggaaaacacagtctgggaattgaaggacacttagcataattttgagaacttaactgtgcaccagataatacgtggaaaaaggactcaattatattaaaatttaatcgctcttgtagaaatcttcgctatatgcctagcaactgaagaatgatactaaaaaatatgataaggtcattaactgacatatttgccaagaattctaatgagatgggaataaatgatcaaactatattacatttttaatgtaaaatattttactatctaatattttaatattaaaaaagtaaacatgtactctcaatcatatatattaaatatgcatggaaaatatggtattatgatacttcataaagaatattaatgagtattctttgatggtagaatcttaagtgatgcttattttcctctttatatgtttgtgtctctttaaaattttctacaataaacatccattcataattataaaaataaacacttttatggaaaaaactcagttctatcagatatagctaggtgggtttgaggctggagcaaaacttgagcaagactgtttctcctgccattttgtaattttgtatccaatgttggagtctcagctttctgagagcagacatcactgtgttgcatatgactggtatgtggcaggcagtccatagataagtgttaaatgaatgaataaataaaaatgatgaggagcaaagatgggcaaccaacttaaagaagcaacatgtggaagtaaatgaaattggtaaatatcaatgtggaaatgaaaaaccacagataattcagcaaggttgcagtgtaggcagttagagggctggggtaggaaatgctgtctcagtctctgcattacagtgtcttattgtccctatgacatcctgccaaatgcttattttcccccccattttctagatgagaactgagttttcctaagcttaagtgatttgttcaaagttgcaacattgttaagtaaaattcagatttgaacccagctctatcctgcttccaaggagccttcttgttcccctgcactgcagagacagaggtctggaaacctgtgtaagcagataggctcttgcaggtaacagaatgccattgagttttgagaagaggaatgacgggatttgtagggcatgaagctgagccaaggggcaaatcactcatctcatttctcccttccagtatctcttatgttacctttacagtacctgaactcccacccttcttgcccctttgggttaaggttcagaagagcttgggtaaaatgctattgttacctaggaagggtatcccaaggcatgaataagttttcagtatgcattatcagagggtaaacccctgaaggaagtggacacatttctttttttttaaattcaataatcctttatggaatacttactgtgtgccattcactgtctagatttttgatacacaccatgaatgagaccgatactatctctgcctttttagaatgatggcctaagaagcagaagtgatcatttttgttgcatatgggagaaggtagacaaaaagtttgaaaaggtaaagtgatgatgcaaacagagtccaggtagggaagagaatccactatggaagccaggcattacagaggctcacatggtggcctgagaaagggaggaactcggacagggagcttggagatcctgtatttcacagtggagctgtcctcccatccttaaaacggcgtgacaacatcacgtttcctctctagataacctcagtctagggaagggattaacacagtagaactatagcatgaatcttgcctgcaagagaaaaatgagctttgaatcattaacaagggaattgctgctacatactaatgatgctatttcccggccctggtctttttacattaatgcaccctatggtgtgaactgaatgatataaaactgattacaggctttggagatatttctggttttgattgttttatgtcatgcaccacttgtttagattatgaattaactaatctgcgttactccctaagttttaagattgaaaagcccttactcctttctctgataccaaattaatataactatctctgatgacagccaatgaagactaaacaatagccattcgtgtgatttacttcacacacacagggtccccacaactcccacccatcttttctaatgattgagagaatgtctccagtattacgaataatttattctagactcaatgtcatttatcttagcttgtagcagcctgccttgtgcaccttagactcaacaaatatttatttaatttataatttttcatatattttgatctattttgaggaatctagccgaacataacaattctaaataggacaaaaaaataaaattatactaaaggatatttaccatatcttaagatacaggaaacagtacagtgtctttcctagtctagctcacacaccactcaacacttctgacactaaaatgagtgtgcaatgagagataggtaaaccgaactgattttttttccctactcgcttacaaagccactcatatgacacagaatgcttctgtgaccagatgtgtgggggggttttctcctcacaccaaccaactggatgttctataattcaatttaattctgatgctatttgcctgaagatagtgtcagatccaacacgttaaaggcaaagatgctagttacaagtagtaggttgtcacctatacttctgactgaccagctggctataaactggggctcccatcactcactccttggattcaattaatttgctaaagtgactggtagaatgcagggaggtgccttacttacgttaaccgacttataaaggattttacaagggatgcagatggatgccagatgaagagatggatacgttaaggtatggaggaaggggcacagaactcctgggtctctctgcaggtgcatcaccctttaggagtctccatgtgttcagctatccagaagctctcagaacccagtgcttttgcttttttatagaggcttcattaccaaggcaagattgattacaacattgatcactggtaattaatttaaccattagcacttctctccctggaggtcaaggggatgaggctgaaagtcccagttctctaatcatgctgtggtctttctagtgaccagcctccatcctgaagctatctagggtctcccagctactagtcatctcattagcatacagaaaacactcctaacactcaggagattccaaagagccatgtgtcaggaactggagataaagatcaaatatatatatttcacagtgtcacaccatagtattatggagatggagatcaaatatgtatttcacaatgtcacaccatagtattatgtatggtataaaaaaaggaaagactctaagcatctaaatatgctaatataggaaattattaaaataagtagggcttttcaaatgatgaaacaatatacagccatgtaattttttttgcaataacagggaaagatggtgatgccaaggcattatgcaagaaaactgggggcagattttattaacattattacaattttgtaaaacatatgtagaaatcttagaaagtatgctaaagtgaaaagagtggttttctttggataatgataccatgagcaataatttttttatttgaaataggtttttccaaattggaaaaactattcttgaaaaaatttttctatacttatccaatcatcaatcatatgcttgtttgagggaaaattatgcaaattcctctaaaagtctgttgtagctatgaagcccagaaaactggaagaatttctgggcaatggcaagtcagtgctgatacctttccctaactaagaaatgtctcaaacatgggtcactctacgggacactggaaattccctacaccactctgagaggctgactactgatctttgctgacacttcaaatggtattagaaagtggactgggctcaggattagaggtacatacttatgtcgagagcagatgagaatcactctactccttaggaagggcttcaggttatgcctgtaatcccagcattttggaaagctgaggtgggtggatcatttgaggccaggagttccgaaccagcctgaccaacatggtgaaaccccatctccacttaaaaaaaaaaaaaaaaaaaaaaggaaaataaaaaattatccaggcttggtggtgcacacttgtaatcccagctactcgggacgccaaggcaggagaatcacttgaactcaggaggtgaaggttgcagtgagccgagatcatgctgctgcactccagactggtaacaaagtaggactctgtctcaaaaaaaaaagaaaagaaaaaaagggcttcaggaatcacagagctagcttatgattctgttcttttcagacagctggttagtggtaaaataatgctccctctcctgactcctaattcagttctacttccaacacattaagttgaaccctatgaaattgccatatttgtagatcaaaatggtaaaataatatgaattttgtttggttcaaccacataggcttgctcaccttgatgcaatttatagaaattttttttaaaaagagtttcctttcaaatcaaagcaaaacaaatttatacttttaatgatgcctgaattttttaaagagacaaacttccctacataatcaatgttctgattcctaaatcagaccttcggtgtaaaaagagaaagtcccaagtaaaagtgatacatttacttatactgtgtaaatgacttaaagtaaaccctttcctagaggtcaggttaagcagaaaaacattgagttcctgaaaggctggataaaaaatagaataggaaataaatatatattcaaatattacttgataccgagctagtcattttcataactgtcattgtatttagccccttccaatgtctttttgagctaaatattatcatccttttttctaatgggtaaactgaagtagcctgaggttaactaaattgtccaaagtgactctgatggccgaatactccacatcatgatttttttccctatatcttactgcatccataagaattgttgcaaggcttatatattcttttctaattaaaaaaagtactctttctgattaatgtattaacttggattggtttcaaatttcacagtggtaaaagacatatagtttaaagtcctgtcaaatcttcagaagccggtcatagtgtgtaacaaagctataagattttctctcctgtttccgtttccgtttttttttttttttttttttttggcttccaatttagtttctcctccaactcacctgagtttttgctttttaaaagtacaaacagtagcaagattcatttctagcatgatgtagtgaggaggtcaataaatcctttaccccaaaagcagtaaaaatctggataaaactgtttaataccagccgtttgagtgctgcagaaattggcccaaggcttaaaaatccaagaagcatttattcacaaaagctactgaacttcaagtaaaattggcatgagtcatggtgttttcgtctaagcagtttctacccctcctctccctaccccaaccctgtgggcctggcagatggaccagggcatggcaagccaggaagaccaggatctttgctcacagcgccagaggaagttcattcattggtgtgttattaaagttgttcttagtctctttaaaagatagaaggttaatagaaaattaatattattgctgagtacatagcatttacggatgttctttccagaaagctgttcaataagacagcacaaaagaagagaaaggaaaagatgtgtatattaaagtttactgtattgagttagcataattttgaagtagactgtactatgttaagatgcgtattataaaccctagatcaaccactaaaaggtaattcgagaaatatagggaaaaactcaacatagaaataatatactaaaaatattgatgtaacatgaaataagttataaaggagaaacaggaacaaaagacacagacaaatcaaaatggtaattgcaaatccaaccataccaacaattacactaaatgtaaatggaataatgagtaagtgtctgttaaggtgatagtgataggtataattagtggaattagagctgttgaagtaaggaaggagtatacatttactacttttatttggggttgcaccaatattttggttcctaagaccaatggaaaactcttatcctttaaagattgagaaagctgtattaaaaacactccactcaaaatgtagattgtcagactatatataaaaaaatcaagatctagtgtaatgctacctacaataaatggaccttagattcaaagaaacaaataggctaaagtaaataaatggagaaagatataccatgcaaacagtagccataatatagctactgcagatctcttaatatatactttaatgcaaaacaacttttaaaatgaagaataaatttagaggacttacactacacagctttaaaatgtactataaatcttcagtacttaaaacaatgtggtatcacgtaaagatagacatagagatcaaaggaaaaaaatgaaagttcagggatatatccttacatgtatgaccaagtgattctttacaaagatgccaagataacagaaatgaaatggtgctatgacaattggctatccacatatgcaaaagatgaagttagaccttttgcttactgtattagtcagggttttcttagagggacagaactgataggagatatgtgtgtgtgtgtgtgtgtgtgtgtgtatatatatatatatatatacacacagagagagagagaggagtttattaagtactaacttacacgatcacaaggtatcataatgggctgtctgcaagctgcggagcagggaaagccagtccgagtaccaaaactgaagaactgggagtgcaatgttcgagggcagaaagcatccaacatgggagaaagatgtagactgagatgctaagcccacctctccacattttttgcttgctttatatttgctggtggctaattggatggtgcccactggattaagggtgggtctgcctcccccagtccactgactcaaatgttaatctcatttggcaacaccctcacagacacacccaggatcaatattgcgtccttcaatccaaattgacactctgtattgaccattacatttacacatacaaaaaaaaaagcctcaaaatgagttatacatgtagatgtcagtgctcaaactataagacttttaggaaaaaatgtgggagaaaatatttgtgaccttggcctaggcaacaggttcttagagatgatactattagtcatcaaaaaaaaaaaaacaaaaaccagatgattgaactatattaaaattagcaacttctgtgcttcaagagatacctttaagaaaatgaaagatacagctgagaaaagatatttacaaaccctttatgtaatagggaatttgtattcatgaaacataactcttacaatttaataagaaaaatctagtgaacagtatgaacaaaaggtttgagtaaacatttcatcaaaaacatgggagcaggacatggtggtgcagtcctataggcccagctacttgggaggctgaggcaggagaatctcctgagcccagcagtttgaggctgcagtgagctctgattgccccactgcactccagcctcatgacagagtgagaccctgtctctgaaaaacataaaatagaccagcctgtgcaacatggtggtgagaccctatctctaaaaagtaaatagctaaaaatgaaataagaaattatttttaaaaatatgaattactaatgagcacttgaaaacgtgttcagcaccattagttaataagaaacacagtgagataccgctttaaacacactaggatgaccgtcatgaaaagacagttaccaccaaatgttggcaaagggttggaactgaaaggggaaaaattaaggtaatggttaaagaggctggtagagacagaagcaagagtctggcacctggtgtgtagcatgatatttaggaagcttcaaagatggggagaaactgttggaaatgtaaaatggaacaacaacctaggaaaagtttggtgctttcttaaagagttaaataaaactgaccatatgacccagccgctctattaagaatctacccaagaaaaatgaaaattatgtcttcatgcagattgtacactactgctcatagcagcattatctctaagagccaaaaatggaagataacccacatgtttataaattagtagacagacaagacgaaatgtgatatatccatatagcagaagactattcagtaattaaaaggaactgaatactgatcaccagtatactgatgtatactgcaatatgaataaaacccaaaacctttattctaggcacaaaagactctatattgtatgattccattttttaaaaatatccagaaaaataatttatagagacaacaaaaatataggttgcctgggactgggggtgagaacagtttaaaagcaaacatgcttgagggaattttggggggtgatggcaaagttataagcctggattgtggtgagagttgcacaagtctacatatttgctaaaggcattgagctgtaaaattacaaagaatgaattttatggtatgtgaattataccttgatataaaagtaaagtataatgtgaacctggaaaagaacatacatagggaaaaactggctatgaccccttgatgcgttcttccaaggtgagaatgggaaccactgattatttacactgcttggtgtggaaagtttgaagccctcgccttgaactagcatgggaaggtagctctaccttgaagagcctcttgtttttgttcttgaaactgctgggatggtcatggcttatgtcttctgggtgtaaaactactcatcaatgcttgctccttttcagtattttggggtctcttccagggtgtagattttaagctagaacaaaattgggtggaacgtctcctctttagggtttacaatgtgaaactgataatgtgagaagttccactggaggaaattagtacttggtcctaacttgggaccaataacagaatgatgcaaagtagctattcaggtttaagtatgtggaataacaggatatttgtttcagaaagttgaaaaactatagcaactgagaaagatggtggcttacctcttcatattgtcataaatatctaccagaatagaatggaaacaataaaaacaaaaaaggtttaagaataagaaaacaaagctgttactaaaatcaataatataggaagctttatagaattttgcaacagaatattacaaccaatgcatgtgtgaaaagcttcttcttaggccttgtatctcaaagatattaacattgccgttttccttttttatgaacacttacaaacttgccattgaattcattgctgtgaattcaaccataacaatgtcaggtttccaaattctcaagatcatggaaaacaaccaacttggaaataataaagcatacactttagatttactttccaatgtttgacaattaaggattttcttaaaaagatttataacattattccttgatgtttattgggtaactttcatcattttcaaaatttcatgaattctgaaattagccttttaaatatagctattgggtatagatatggaattttcttggagagaaaaaatattttattacttcacttcccttattaaatgctatttttattgggaaaaaatgttttgttggctataaaatatatagtgtcaataattaaatagtatatgcattaaatcaacactagagtaattttccttaggaaatttgttcacaataaactaaacaactataattctattataaatactaatagggattaaaaaagacaaccaagttcttttgtgccagtaagactgagaaagctcttttgtccatgacagagtactgaataaaatttgatttttgacgtctggtttctggaggagagtgaggctatgactggcatgaaaatagttcaggaatattaccatcaagagttggggagaggctgacggcacaaaggtggcatgtgagtttgcaagagagttaaaaggagaaagatggaaggggttggggttgtagatgtgtagatgtgtaggttgtagatttctgagacctctgttcagttccattggtctatatatctgttttggtaccagtaccatgctgttttcgttactataggcttgtagtatagtttgaagtcaggtagcatgataccgccagctttgttctttttcttaggattgtcttggctacacgggaagacctaaaaccataaaaaccctagaagaaaacctaggcaataccattcaggacataggcatgggcaaagacttcatgactaaaacaccaaaagcaatggcaacaaaagctaatattgataaatgagatctaattaaactaaggagcttctgcacagcaaaagaaacttatcagagtgaataggcaaactacagtatgggagaaaatgtttgtaatctatccgtctgacaaagggctgatatccagaatctacaaggaacttaaacaaatttacaagaaaaaaaaaccatcaaaaagtgggtgaaagatatgaatagacacttctcaaaagaagacatttatgcagccaacaaacatgaacaaaagcccatcatcactggtcattagataaatgcaaatcaaaaccacaatgagatgctacctcatgccagttagaatggcgattgttaaaaagtcaggaaacaacagatgctggagagaatgtggagaaataggaatgcttttatactgttggtgggagtgtaaattagttcacccattgtggaagacagtatggcaattcctcaagtatctagaaccagaaataccctttgacccagcaatcccattactgggtatatacccaaaggattataaatcattctataaagacacatgcacacgtatgtttcttgttgcactgttcacaatagcaaagaattggaaccaacctaaatgcccatcaatgatagactggatgaagaaaatgtggcacatatacaccatggaatactatgctgccataaaaaaggatgagttcatgtcctttgcagggacatagatgaagctggaaaccatcattctcagcaaactaacacaggaacagaaaaccaaacaccacatgttctcactcataagtgggaggtgaacaatgagaacacatggacacaaggaggggaacatcacacactggagcctgtgggggttggggggctagaagagggatagcattaggagaaacacctaatatagatgatggattaatgggtgcagcaaaccaccatggcacgtgtatcactatgtaacaaaactgcacgttctgtacatgtatcccagaacttaaattattaaaaaaaatagataatagtagtgaaaaggagggacttggcttgtgtcatcacatttaggaagtttcaatgaatcagggagtgttttccttccacaagactgctctgcactggcaaatatccctgctggctttaaggactgcttgggatacattccaggtcacgattgtttttgtcatctgtcatataaagagctgagggttgtgagacaggggttcacctctgtcacccaggctggagtgcagtggtgtgatctcggctcacttcaacctcctcctcctgggttcaagccattctcctgcatcagcctccagagttgctgggattacatgcacctgccaccacgcccagctaacttttgtatttttagtagagatgggagtttcacctttttggccaggctggtctcgaactcctgacctcaagtgatctgcctgccttggcttcccaaaatgctgggattataggcatgagccactgcacccagcctattttctgttattataaatgcagggtaaaaatcattttttaaagctgcctgatacatctttttattctccattttcttggtatcacaaatgatactgcaatgaacatttttgtgcataattagttttttctacatattgcagaatatttacatagggcagttgcccataaatataattggtgggctaaaattaataaacattaaggtttaaggctcttgatagttatattttatgtttcttccttagcagttgcatgtctatcagcaatgctagtgtcctcttcacccacaatgacgctgtatatcatcattttaagaagttacttgctaattttgtattctctaaactaaagctaactctctaaacaaattcaagataaaacaacaaaaacaaaagtaatatcgtagtagaacctaatctttcttcagtgcgtgctgtggactaaatgctttatgtgaactcactctgtattccactgacctttttcaggtgaatattacattatgtctagtcaaaaaatgagtaaatagagaaacaggttatgcaactatcccaagtttaaattgctggtatgcatacttccaatttattaccaacctaccagtttgtattcatcctatttataaattaggacacttgtattctccccactgactaatgcacattccaatatttttttctttctctgtatatgcccctaccccttttttttctgctgtggtggactcctattccttctttagagatgagtcaccactctgtgaggtcttccttgtagtcatcaccttccttgagtaattctgtcaccttaatggttctgcagcgctgtcatacaggtaaaattacttttgggtatgcctttctttcctgctaaagaactgcctttgccagaacacagaaaatgtgccatgcaatgcaaggcctccttcctacctccattccctgggtggatgggcaccagcacaggaatgtttattgttggatgtggctgggctcaggccacttctctctctcctggacctgtcttacattcatggacaactacaatcaccatttctgttacttaaaatacttgtctccagcattctctccatcaaatcagaaattctagagcagaaattatttttaaaaagttctccaggtggtcttcatgtaacgtgagagagagctactctttgggaatcattgatctggtagcttagtctgaaaaactggtgctttggaatcactggcagccatgccgccatgctttgtagagaaagtgggctcatcagtttcatcaaaggccaatcattctgtctctctgcaagtacatatcagtaaaagggaagagaaaattaacaaaataataaaatgttagaaatgaatggagcatgatgatcataccaccaataatactaaaactaatgtttattgaccatattatgtaccagatgctgggccaattgctgtatgtgcattatctcttaatctaaagctgtgcttatgaagtaggggattattatcttcatttttcaaatggagattctaatatttagacattaactaatttcatcaaagcgacacagctagtaagtacgaaaccaggatttaaaataggcagcctgactggaatctgcatgattaaccctgatgtaaggggcatgggggagtttaggggaggaacttagtctaaccctacatctttcatgtttaaatagcaaaaagaagaaggcagaggactggtgtgatttaattaataaagtttatatatccatatacaagtaaaaaaatcatcttttcaagtttccatgaaacaaatgttcatgtaaatacagaatgggttcaatactgggccaaatataaaatactaaaaaaacagaaatcatgcaagccacatttactaataatagaataaaaattaactatttttaataatacaagtcagcaattttcccaaacccaagtaaatattaaataaaaggagaaatcataagtggaattatagatgatatgtaataccatgaccatggaagctatacattaaacactttgacatgcagccagatgaatacttcctacagcaaaatagggcaaaaactatcttaagagttttcttttttaacaagagggaattaaaatcaataatcataacactgaactatttcttctaagaagataaaaataaaaacaaagttaccttttggatgcattaggctgatgagcatgtgacccagccacatcctctgaatggaatggaatggaaatatgtgtggggcaatagctaaggcctaattatgacactgcagatttagattttttgtttctcttctatgtgtttaagtcatttccttatggaagtcacttaaatggatctgacacttacaaagccattattatctgctgtgttgtattctgtgttctttgaagtgattgcaaattggtagataaatcatgctggtagattccaggtttcaaatgtaggacaactcatctataattattaaaatctcctagcaatttcatctctaaaactgccataaatggtatatatatatatatatatatatatgttaatctatgtatatttatttgagagtgtgtatatacacacacacacacacacacacacacacacacactgccttcataccatagacacaggatgctctataatgcatattttgtttattcttagattaattaattttcttctctcttccatgaaatgctattatggcatttttaatcacaactgcaattatcttaagaaccgtaccaaaggagtgtcaggcattagtaatttcattaattttagtcattatgccaaaatacattaatttaaaactcatatactcaaataatcaaaataatgcctttttcactacttttcaatgtttttctccagctctagttttttctatttttatcattgctagtaatacccttttcctttgcacatctgtgatgagcttttatgataatagaagttaatttttttctgcctttttagagtattgcattagcagtactcttctttcagggaaacaaaattctcatggtcgtttacttgtgctttaaaatgatttaatgatatttaaatgaatgtttatattttctaccttgcattagagttatatgtgtatgttaactgttttatcttcactcaaagtgtgagcacctgagagaagttttatactttggtattctccctggcatatattacatctatgtccacatacatatattccagtactttgcacatgttagctgctcaatttgcatacattaaatgaagaaaaaaatggtgacttttgtcttttgcaggcaactttcccattctcatttttgctttctttgagctgttttcctgtaacacacctaattcagccaccactgtggaaagtgttctttatctgatctgattgctcaatatcagaagggttacaaagattattccacaatgaaacctaagttgttgtttatgtatttaaattaaatttggatcccactactaggaatctactcaaaggaaaagaaatgaatttctctaagggctacctgcatttgcaggtttattgcagcactattcacaataacaaagatagcaaatcaacctaaatgcccatcaatggattaatggttaaagtgtggtacatatacaatatggaatactatttggctagtatagtatgaaattctatcatctgcagcaacatgggtggaactggtggtcattgtgttaagtaaaacaacccaggcagagaaagacaaatttcacaggttctcactcatgtgggagataagaaatttgatcacaaggaagtagagagtggaaagagagagaacagagactgggaagggtgagtgggatggctaaagagatgtgacgagtacaaacatagttattcggttggagaaaagtaatggcaaaaaccgcaattacttttgcatcaacctaatagaaggaatgaattttatgtttcatagcagattagggtgcctgtagttagacaaaagcatattttactcaggtgatgaacaccctaagtacccttaatcactatgcattatatacatctaacaaaatttcacaagtactgcatacatttgtaaagataaaaaatattttaaatgaaactttgaactttgcaaaaaaagaaaagggttgcacaaataatcatatagtttcctcaacaattaggttaaacttctctcttgtcttttctcttcacccccaacccatacttgagagattttataaatgattcatatagtttaatatttatctgtgatcttctggaaaggctaagctgtggattatgactactttagccttaggagctctcctttgattttaaagtatcttcttacccatcaaagtggccacaagctagttacagttgcagtaagcaaaattgccctaaaaaaagaaagaatggactttcttagtccatttgtgttgctataaaggaatacctgagtttgggaagtttttaaagaaaagaggttttttgtttttgtttttttttttttttttttttcccccccaaacttttaatttaaaaaaattttttttttttttaaaggttttttttttaaaaaaacccaaattttaagggtacatttccacattgtccaggttattaacatatttaaacatttcccagccgggggtgccccccccacaaacttttaattaaccataaggtatatcccccaatgctatcccccccccctccccaaaccccacaaaattcccaaaattttaatatccccctcccaatttccatttaatcccatggttcaatcccccccaaaaattaaaaatacccggtgttgggtttccggttctcgcaaaattttacggaaaataagggtttccaatttcacccatttcccaaaaaaggaacaaaaactcatccttttttagggcgccatattatcccagggtgtnnnnnnnnnnnnnnnnnnnnnnnnnnnnnnnnnnnnnnnnnnnnnnnnnnnnnnnnnnnnnnnnnnnnnnnnnnnnnnnnnnnnnnnnnnnnnnnnnnnnttaaaaatattttgggattatttggaaagggtaaggggtggataaagaataaattagcactaggagggttcccttggattttaaggatttttttaacccttcaaaggggcaaaagggtggtaaaggtggcgttaggaaaaatggcccaaaaaaagaaaagaaagaaatttttttgttccattggggtgggataaaaggaaaaccggggttggggaggtttttaaagaaaaaggggttttgggtttgggtttttttttttttttttttcctctctaaatttttattttaaaataggtttttttttttttaatgtttttttttttattatactctaagttttagggtacatgtgcacattgtgcaggttagttacatatgtatacatgtgccatgctggggtgctgcacccactaacgtgtcatctagcattaggtatatctcccaatgctatccctcccccctcccccgaccccaccacagtccccagagtgtgatattccccttcctatgtccatgtgatctcattgttcaattcccacctatgagtgaaaatatgcggtgtttggttttctgttcttgcgatagtttactgagaatgatggtttccaatttcatccatgtccctacaaaggacatgaactcatccttttttatggctgcatagtattccatggtgtatatgtgccacattttcttaatccagtctatcattgttggacatttgggttggttccaagtctttgctattgtgaatagtgccgcaataaacatacgtgtgcatgtgtctttatagcagcatgatttatagtcctttgggtatatacccagtaatgggatggctgggtcaaatggtatttctagttctagatccctgaggaatcgccacactgacttccacaatggttgaactagtttacagtcccaccaacagtgtaaaagtgttcctatttctccacatcctctccagcacctgttgtttcctgactttttaatgattgccattctaactggtgtgagatgatatctcatagtggttttgatttgcatttctctgatggccagtgatgatgagcatttcttcatgtgttttttggctgcataaatgtcttcttttgagaagtgtctgttcatgtccttcgcccactttttgatggggttgtttgtttttttcttgtaaatttgtttgagttcattgtagattctggatattagccctttgtcagatgagtaggttgcgaaaattttctcccatgttgtaggttgcctgttcactctgatggtagtttcttttgctgtgcagaagctctttagtttaattagatcccatttgtcaattttggcttttgttgccattgcttttggtgttttggacatgaagtccttgcccacgcctatgtcctgaatggtaatgcctaggttttcttctagggtttttatggttttaggtctaacgtttaaatctttaatccatcttgaattgatttttgtataaggtgtaaggaagggatccagtttcagctttctacatatggctagccagttttcccagcaccatttgttaaatagggaatcctttccccatttcttgtttttctcaggtttgtcaaagatcagatagttgtagatatgcggcattatttctgagggctctgttctgttccattgatctatatctctgttttggtaccagtaccatgctgttttggttactgtagccttgtagtatagtttgaagtcaggtagtgtgatgcctccagctttgttcttttggcttaggattgacttggcgatgcgggctcttttttggttccatatgaactttaaagtagttttttccaattctgtgaagaaagtcattggtagcttgatggggatggcattgaatctgtaaattaccttgggcagtatggccattttcacgatattgattcttcctacccatgagcatggaatgttcttccatttgtttgtgtcctcttttatttccttgagcagtggtttgtagttctccttgaagaggtccttcacatcccttgtaagttggattcctaggtattttattctctttgaagcaattgtgaatgggagttcactcatgatttggctctctgtttgtctgttgttggtgcacatagttggaagtaaagctctcctcagcaaatgtaaaagaacagaaattataacaaactatctctcagaccacagtgcaatcaaactagaactcaggattaagaatctcactcaaagccgctcaactacatggaaactgaacaacctgctcctgaatgactactgggtacataacgaaatgaaggcagaaataaagatgttctttgaaaccaacgagaacaaagacaccacataccagaatctctgggacgcattcaaagcagtgtgtagagggaaatttatagcactaaatgcctacaagagaaagcaggaaagatccaaaattgacaccctaacatcacaattaaaagaactagaaaagcaagaacaaacacattcaaaagctagcagaaggcaagaaataactaaaatcagagcagaactgaaggaaatagagacacaagaaacccttcaaaaaatcaatgaatccaggagctggttttttgaaaggatcaacaaaattgatagaccgctagcaagactaataaagaaaaaaagagagaagaatcaaatagacacaataaaaaatgataaaggggatatcaccaccgatcccacagaaatacaaactaccatcagagaatactacaaacacctctacgcaaataaactagaaaatctagaagaaatggatacattcctcgacacatacactctcccaagactaaaccaggaagaagttgaatctctgaatagaccaataacaggctctgaaattgtggcaataatcaatagtttaccaaccaaaaagagtccaggaccagatggattcacagctgaattctaccagaggtacaaggaggaactggtaccattccttctgaaactattccaatcaatagaaaaagagggaatcctccctaactcattttatgaggccagcatcattctgataccaaagccgggcagagacacaaccaaaaaagagaattttagaccaatatccttgatgaacattgatgcaaaaatcctcaataaaatactggcaaaccgaatccagcagcacatcaaaaagcttatccaccatgatcaagtgggcttcatccctgggatgcaaggctggttcaatatacgcaaatcaataaatgtaatccagcatataaacagagccaaagacaaaaaccacatgattatctcaatagatgcagcaaaagcctttgacaaaattcaacaacccttcatgctaaaaactctcaataaattaggtattgatgggacgtatttcaaaataataagagctatctatgacaaacccacagccaatatcatactgaatgggcaaaaactagaagcattccctttgaaaactggcacaagacagggatgccctctctcaccgctcctattcaacatagtgttggaagttctggccagggcaatcaggcaggagaaggaaataaagggtattcaattaggaaaagaggaagtcaaattgtccttgtttgcagacgacatgattgtttatctagaaaaccccatcgtctcagcccaaaatctccttaagctgataagcaacttcagcaaagtctcaggatacaaaatcaatgtacaaaaatcacaagaaaagaggtttattgggctcatggttctgcatgctgtataagaagcatggtgccagcatctgcttcttgtgagggcctcaggctgatttcccttgtggtgaaaggtgaggggacctggcatatgcagagatcacatgacgagagggaaggcaagagagagtggagattctaggttccttctttttttttttttttctttttgagacggagtctcgctctgtcgcccaggctggagtgcagtggcccgatctcggctcactgcaagctccgtctcccgagttcacaccattctcctgcctcagcctccccagcagctgggactacaggggcccgccaccatgcccggctaattcttttgttcttttagtagagacggggtttcaccgtgttagccagaatggtctcgatttcctgaccccgtgatccgcccgcctcgacctcccaaagtgctgggattacaggcttgagccactgcacccggcctccaggttccttttaacaactagctttccaggggattcttgtgggaactgatagagcaagaactcacacattccctgccccagggagggcattaatctattcatgagagatctgttcctatgatccaaacacctcccattagtcaccacctccatcactggggatcaaagttcaacatgagatttggaggggataaatcaaactacagcatagatcaatccagaaagtatataaaatctggctttgtaacattaaactggcatccatgtattcacaggggctgagcccttttgttttgtggatgtactcttgtgatgctgtaatttgtaatgttaaagaatatgactctcacaagcacatagtcattttacgtaagtcctctccaagtttgcttcctctgaaaagatggcaaacgaacttttcttgctctccacactctgctgtgttctaagcttcttggagatttttgtgtaagcctcaattaatgaatgggttctcctcaacttatgatgggtttatgtcctgataaacccaccgttagttgaaaatgttgattccacgtcaaaaatgcatttaatacacttaatttactgaacattattgtttgcctagcctatcttaaacttggtcagagcacttacaccagcctacagttgggcaaaatatctaccacaaggcttattttgtaatacagtgttgaatatctcatgaagtttattgaatgctgccctgaaagtgaaaaacaatggtttgacaccattgcaaggacaaaaatcattaaattgaacccatcattagttggggatcatctgcatgttttaatcaggctgagatttggatgttaaccccaatacctggttgcttggaaatgtggcaacttcacccagaaaaacagacacgagacttttctaaccactatgatcagtgtttttgtaacttcattaattcatcctgcagattcttttctgttcaaattcttctgtgtgtatccaaaattggcataaacctagtccagttccctgggaattatcttattttttcgttaaggcagcacaagtacagaaagaattatggattaccttattggatttctccacatttatgtgaaattcatctgcatcagtctgtttttttgccttttttaattggtaattcaaactgatttccaattctccgttgaactatgttatcccgttctctgaacagagtggaatttatgtacttctgtgtactcccccttcatgtttatccaatggataagtgtaacttatccttttgactgcagcataatttacatgaagaacatttaactacccattgggctctttcaatattaggaaagattatttcactggatttctttggaagagaaaaatcctctaaaatacatgtcatcctttttgttgtctagcaaatattctctctcttccttctccttctatggtaggagtgtaatattaaagttgggcttggacacatgactttgtcaatgaaacatggcagatgtgacagggcacatgtttctatcaatcctcatgtactcctgcctgcattatgaaatagtatgtcttagttggtagctgctctttcatcctgggactttaaataagaaaacacatggaggctgttctgaaactgacttattacctggagagggtccacatagctgacctgcagaccagcctgtgcaaaacgaatacttgtggctgtaagcctctgagatttggggttgtttcttatgaagcatttttacaaggaacatttgtccagtgggaattcagaattgttctggatcagtgactactatgtgcctctcatttttcacctgtccaaatggggttgtttattgctgtcatccttgtgttgtttcacttttgtatgatgtatgtatgtgtgtgtgtgtggtcataaggggatgtaaatagcttttctttttacctcatcggtgtctgaaacagtacaaaccatatctggacctgctacagaagttagtacaagatcctggacttcaaatctaatgtcttttggagaattccctgagagagggtatgagtacattttggacacagagggaaggagcactaatatttgagatcaagagcgaggactatgaaagattttattattcagcaaataatcactttctcttcatcccctattggaagcaaacactattgaggcccatctctgttgttttggccatatgacttactccgaacagtggaatgctggaagaagtgggtgtgctcactctaaaggaaggttttaagaggcattgaaagtttctgccacccttcttgcactccagcccttctcataatagtagcacaccctggacaggctggagtgcagtggcatgatcatagctcactgcagcctcaaacttctgagttcaagtgatcttccttcctcagcctcccaagtagatgggactacagtgcacaccaccccacctggctttttattttttgtagaaacagagtctagctatgttgcccaggctgatttcaaactcctggcctcaagcagtcctccctcctcagccttccaaagtgctgggattacaggtgtgagccgctaaactcggctatttttatgaaattttaaaacataagtgtattatttgactccttgagaaggacaagtaagaaacagaattgtggacctgtttagatgctaggaggcaatatggtgtggtgaaataaatatcagttttggattaaatatttctaattctgatccgaacagcgatgatttctctgtgatatttgagaagtcacaatgtcttagaacacaatttgtctagacaatggagagtccaaagtgggcagggggacacaggtcaaaaaaatgacctatctggtactatgtttgctacttggacaacaggatcattagaagcccaaacctcggcatcatgcaatatgtccatgtaaaaaacctgcacatatatcctctgaatctaaaattttaaaaaagaaaaacatgatgtgtttcatttataaagtgaccctttaacatactgtgaaggattgctgggaaaacttgaaataatatatgtaaattgtgtagctcagtgcctggcatgtattatgtggtcaataaaagtgggagcatttgttggtagtgctggttcttgttgaggttttggtgattctcctcttttaaactctactcaggctaaggctcatgtcttcaatacactttggaaggaatctcaacacttgctcaagtgctgggtattcagtagatgtgacgggctaggatacagactgtgatattgactttctttttagaactgtgaattgtccattatgcctatggttatggaaaaataatatgcacaagtttttcaaaagaaagaggagtgtagtcaaaggttattattagcagttcaacactgcgataggtgttgtccaatccgctgtacacaggtctcctttagagccaatgtcttgtttaaaaaataaagcaagctaagcatgtaatagtggcacatcgagaaatgctttatgtgatacagagtgtacccgagtgctgactgaagtagttatgaagctcctgggcaggccaaatggcataatagcagcaaacccatagatctaggcttcttacatggtaaataacaaggtaggtcaggtgtaccctggggaggaggttttggggatctgagttcctgcatctgagtcttttccattgtatatatcctttccctccttgttggttggttttagtattaaaacaaagactatcccaggttctctgcaccctaaaatctggaccagcccataggatctggtccaaccacatacttacctattaagaataaaacaattgtaaaagtgtaatatttctattccccccaaaaaatcagaaagtaaaaagcaagttaatctcattagctttcaggataataaattattttactaattcactctctctctaatctcatgatatttctaaaatattttaactgttatgtgatatcttcaaaaacatataaggaactctgaaaaagaaggagggcatttttccaaatttcttacttctcagaatatataaaaatattcaaaagtaaaaagaatgattcttgaaatctgaacttgaggctttgttttattatataatgcaggagagtgatgccgctggctgagtctgggaaagtttacagaattctggtctgaggatcatcccacaaccccctcccctaccaagacctagagtctgggtgttcagattgggcacttggcagcagacgatgatctagaaggcaatcaaggaaagtggctattaaaagatcacaggcttactgaagggagaaaaatgacttttgctaaaagctaaatctctgaatatccccgaagctattttttctcttgacctatatgtgtggccctgtgtatgcatagtcacaattttcacctgatttttttttgggtgtggggggtaatgatctttacacacatttaaatttaacacttgctaagccacttaaaggactgagttaaataagaaatcacttaagcaatcttggattcttgccattccttgtgatttcatggggaggggggtaccactcgtaggacagaagccaatctctaattgttttatttaattagatcatttcaatagctaagctagcctgaagaccttgtttctctgtgtcctctcaccttgattgggttgctttgttcaagcctatttctctagaacctttgtactttttgaccatggaattgatggggtattagctggggtcttcacatattttagcagaggcatttctcaggttgcttctcattttcccttctcctctgctccatgatatatgaaaattgattatttttgccttcctgcagccaagtagaaggttgtaagtcactatgaatctataaaagctgtcacctttcagtggtggtgcatttgtgatattttctgagggctaagagaatgggtgttcttgataaatacttctccctgtcacctaaaagacaaaaaaagaaagtattccactgtcaatttatcataaacttgaaatgtcaatggaaaacagcattttttggttgcacatgaaaattacacatggcattactttgaaagattgaatcttctgaaactcatcaagcaataactgctccacacattcagggatggcagtgtttttcttcctcttctgtcagggaatgcattacagaggtgatgtgagtctatggcttctctgagcaccaataagaggtccaaatgaatgattggaatgcttgcaacttggctgaaccaaatgtgatgagttcttgttctcacctatttttaaataactcctaaatattcaaccaaatgtaatttaattgcatttacatattggaagctaagcaatgggtgaataaggccaaatccttagcaggatgctaatgggatttggaagttcaagatccctgatcaactctactagcttatttatgatggaatcacagatgtggatcacaggtcaagaaaggttggtcagttgtctgagggagcatttctccacaattctgccccatcatttccatacaaactaaggttacaccctataatttgagtgtggtctgagtctactaggaagggggccctggaccctaaatcttatcttcattagatgtcagagttagatggtaccttactcaaaaacgggcccaactcctacatcttaagctgtaagatttacccaaagacatacaacaaagcaaagtggttgcagattctggtgcacagcttttacccacaagtccattgtcacgttggttttgttttgttgtttgctttccctatctccactctgatcctaattctgaccataagtttcatctgcgattttgcacaagtcaggagtgacttgtgggtgaaggcctgtgtatgagtgggatccgcactcatgcatttacttgcataggtcctgcaaggaaggacctcagcctcaacagcatccttcagagcagccaactgcagtgatccttttcttatccgtccttattacttatttacataaagagctgccatcccttaactaataaattttgagcctttcttgtaaatctggatggcttgccagtgtgatggcagtgcaaaagtgatttccccagagggcaggcagtagacagaaagtaactccgcctttgttagggaagatatatgaggcttttagctatctgcaaatatggtgaaattggacgatggtagcagcatccaatcaccattccagttcctctctgccagaaggacataatgcaggagtcagtatatggttccatgcccaaagatgcaaaacagaaagataatagcatatgtttgctgagacttgaagccaggtattgcattaagcattttaaataccttattccattttaaaatccttactatagcctgagagggtgagtattattaaaatgaccattttgcaattgagaaaaatgaggccccaaaaaagctgatcctcttgtttaaggtcttaaaattagaaacagaaaagctggcattgaacatgggctatttgaccccgaaacctacggttgtagccatcacactctgacatgagaaactgctaacttagggctctaatttcatgcaagcccagaaaaacagtgtattgaaagaaaactggtaccaacctgtgggtacggtgatgtgtcttctagtcccaggtcaccacgcactgaccatcaatcttagggaagtcatctgttctctgcagcccaacctttgcattctcatctgttaaatgagtttgggacagtttggtttctaagatctcttctagttctaactatctggagctaggttgtaaccaagccaagggcaggagacacatcacctgattctgagttaaacccccacaggacatttatatgaggtcagtgttgatacctccacatgactctttatacagaacagttcacaaaacatgacttatagactgtaccataaaagggcttttaggaagcatttaattaaagccccaattcttttcttaatatatgatgcttactgaaaaatattagatgtaaaattaaaaaaaaaaccatgaatctcattggtaattctaccacatttcaaatatatcacacttaatagtttggtaaatatatttccatgccaccccctgttttggtactaacatatgcaagtatttttctaaacaaaaataaagtgataatatttaacctgcttttgactcccaataaacagtgcagtttttttctgttaatattctaaaatataaaatatagtcatacagggaggggaacaacacacactgggacctcttgagggttggggttgggggagggagagcagcagtaaaaatagctaatgcatgctgggcttaatacctagattatgggttgataggtgcagcaaaccaccttggcaaatgcttacctatgtaacaaacctgcacaacctgcacatgtacctaagaactaaaaattaaaattaaaatatcaccataatggctgcatagtattccactgaatgaaagcaaaataattggcgttatctttgctcaatagagcaaaacgagttcatttttaaaaattgttttcattttttattatgaataacttgacagatattcctagagttaaatacatactaacttcaatgggataaaagaaaatgaaagaaatgctacattaaagacaatgcacttttaaaaagattttaggtacatactattaaaatctctacagaaaggtttattagttgtcattttacccgttagtataggagagtgtctatttccctaaacattcatcaatattacgtactatttttaacaagtattgccaaaccattgctgagttctcagggtgtcttcaaggcaatttaacatgatggataaaacacagcccctagaggcaggctggaactggggctctgctgtttgctatgttgtgacctttggcaagtaacttaacatctctgtgtctataaaatggagactttagtaacatgaagggttgcatgttatatatgataacatatagagaggaagtagaatgtaggtaagagatattttaattgtgaattactattctttaattacaaatgaatttgagcacttgaataagtttgctaaccatttgtttctctttttctcaactgtagcttgctgtgtttagcccacttttatattcaaagattctttttcttttcttaactttataagaaggttttatatgttaggaatattactttttgcctttcacatgttgcaaataagccccatattttcaaacaagcaccctgagacccagagagattaagctctgtgtcttctaatgttccatccaggtctcttaatttgcttcatttttcattcatttgttgtcacaaagcttttcctttttgttttttacttttggtgagttgtcgattttattcctctttttttcttcatgttcaatccaaatttgaacttaaataaatacaattacaccttgttaacaaaggcctctggaagaaaagtaatttcaagaaaattgtaaaattgacttattacttcagatgttgagctctatgtgtcttttgtgattctgttcacatcctctgaagtctgttctaaccatacctgtctgttttccggttatgccaggcaaaattttaagttgaatcctgtgatggttagtattgattgtcaacttgattggattgaaggatgcaaagtattgggcacttatttctttcctgtgttcttatacactttgtcatatttagataatgcacttcccttgcattattgaaattgtctttatgtatgttggtctctcagcaaactgtgagttccatgagggtagggacaatgtttcttttgcttttctgtcctcagagcctaataggcatttggagaatggcaaatcagatcccttatatcaggatgagaattagcagaactatatgtccagaagctacctgaggccttctgccagctacatctgccataggaagttataaaagcaattaagtgttcatacaactctaaacttaaccatgctacagtagaggtgattaaaaacaacaacaacaaaaaaaaacttaagcactgttgatgaaaagagttgaactctgtaaattatttgaagagatttattttgaaccaaatatgtgtgaccatgacctgtgacacagccatcgggaggtcctgagaacatgtgcccaaggtggttggggctcagcttggttttatacattttagagaggcatgagacatcaatcagatacatttaagaaatacattggtttggtccagaaaggcgggataactcaaagcaggtgagggagcagtggggagcttccaggacataggtgaatttaaacattttctggttgacagttggttgagtttgtctaaagacctggaattcacagaaagggaatgttcaggttaagataaagattgtggagaccaaaattcttttgaagtcttatggtggctgcccttagagacaatagatgacaaatatttccattcagatcttagtcagtctctttaggattgggagggtctggaagaaaaagatctagctatgtttatagagattctttacagatgcaaattttccgccacaaagaaccactttacagggccatttcaaaatatggcaaagaaatatgtttgggggtaaaatatttttattttcttccttgtctcataatgttatgccagagtcagtttggaaagtaagtcacagtatatagggttaaataaaacccgtctaaggagaatttacgatttgtagggcatgactccccacatcccttaggaatttgggcaagaaaaaaaaatcagagtttagtcctcagcacatagaaaaatcatctgacttctattatcttccactaaatcactaaatcttgggcatgccatttgatctctctgcatcacactctctttatctgtaaatgaaatattggaactaattgaaatgcctctaaggccagtgttttaagttccagtgttttatagttctataaggcttcaaactagaaaccacatatatttgtgtttttatttttttttaacttttaggttccagggtacatgtgcagtttcattatataggtaaattgtgagtcacgggggtttggggtgcaaattttctcatcacctaggtaataagcacagtacctggtaggtagtttttcaatcctctccctcctcccaccctcaagtaggccttggtatctgtccccttctttgtgtccatgggtactcaatgtttagctcccacttttaagtgagagcatgcggtatttggttttctgttcctgcattagttcactgaggataatggcctatagctccaaccatgttgctgcaaaagacatgatctcacccactcttttttatggctgcatagtattccatggtgtgtatgtaccacagtgttttgtttgtttgtttgtttgtttctaatctaatctaccactgatgggcatttagattgattccatgactttgctattggagatcacatatttgaaagagaaaagcaagaaataaacaagaataggagtgaacccatgttcactagatctaatgatctgtctcatatacttgagggagttccttattcaatggagacaaacaaaagaacaacaaaacacaaaaataattataaaaacatcaagatagccttcaccccataggattgtatttatgataacaattcttaatcttctattaacggggttaaaacattctttactctgcacagctgttctgtagcttttaagatatggcaaaaattgcaaaagaatcctgaattttaaaggaagggataccaaaatagtgtgcatattatggctacagaagcagtggctttggtgcttttatttggagctaccatcatttccacttagctcatttctgtatgaaaatgaaactaatcagcttcagtgcatgaaaccattagctactacttcaaagtgctgcttttcacaaaggtcaaagagggcccacccagcagcaacaggaattttgcaagtgatgtgtgtcacatttgcatatgataattagtttctctataaatacaatttgttctgcagattaacattttgtgtcctcattagatagcaaacatttccatattaaacccacaaagctgccagcgttggctctgcttgcattgcatgatagcattaatacctttgtttatactgatgccaattagtagtgctaagtcttggaagaataaaagagatcactaatgctattaatataagtagtaataataatgttgagaagctttcacaaaccttgttaacttcaaagatcattagcagtaaagtaccactgggttgtaaatggctgcgttcttggacacataaagtataagcatatctagaatgctctggtctgccttctcctggcttacaacaatgccagtcttaaatgatttgcatgctgtaaacaggagcaagcaattaaaacgttgttttcttttgctaaatgcatttagttcaataaggaaaaaggatgtgctctagccagaagaaacagcagtttgctcaacttgtgtagctcattgcaacacagtttgctgtcatttaccaggccaacttctctaaggcggcgaggcattttatggttccataaaaggtttttataaaacaagatgacctggaatttctcaggggaggatttagttttcactggaccagagtggcaagttctctgaggaggttgttgagggatatagaagacggtgatagatacatgagagatggggtggtggttgtcacctgttgcattaatcttttaatactgagtagaggaggctgtgtcagacagatgctcccttgtgaagtgttagttctgcacctgaaagggctgcacttacatgaagactagtagtcattcacccacagttcagtgacaaggtatggatgatcatatagtcactgttggtaagcacatttcttacagtaattaactaacttcatttctcggcctgtttttgttttgttttgtttttgagatggagtctcactttgtcgcccaggctgatgttcagtggtgcgatcttggctcactgcaacctccacttcccaggttcaagcgattctcctgcctcagcctcccaagtagctgggattacaggtacatgccatcatgcctgactaatttttgtatttttagtagagacggggcttcaccatgttggccaggctggtcttgaactcttgacctcaggtgatccactctcctcggctccccaatgtgatggtattacagatgtgagccaccgcacccagccttcctgcctgttttttgtttgatgtggtgtatatacttagattcagcaattttaaaaaacattgattaaagcaccagttaatcaactgcgatattcaaccaaaatttaaatgctttaccattggagtttgggctgggacacagagcccaaactaaattttactaaaatgcagaattttatatcatttcagaagtcaggctcacagctctgctattactagctgggcaattttggatgagacagtttctctgtcttaatttcctcatctgtgaaatggagacgagaattgtacatacctcacaaaattatcatgaggattaaatgagctactccagtggtaacacaatgcctggcccaaaaaacagactccagtggatacaagctattgttctcagttttgcatacttaatatttcctgatgctgggggaacaacagttacaaaataacatctctcttggcagattgataagaactccagtcttcctcaaatcttacccaggaggcgtcacatgtgccagacacagaaccctctcctctcagctgtgacctgagttctctattctcctgcctctagttgtttcttaaatatcacctgtcactcagatggtgtttccttcaccacttccccatccttgcacctgccttgctgtggagctaattttgtcttatccaatatgacatgatattctgccattgtctcatcttatgtggtatacagcatcactcaagtttcagaagagtgtagtcttatattttcactgttgaccaaagatttctgtaaccttggtcttttgttctcactattctatcactccaagctttggcacaagttccttgtgggaagaaaactggatccacataagtagttgagtccatacctccaatcattcttcccttcttatgcggacctatggccctgaagaatgacttgtggttggtgatatggtttggatcccatgttcagttgtaatccccaatgttgggagtggggcctggtgtgaggtgactggatcatgggggtggatccctcatgtttggtttagcaccatccctttggtgctattctcatgatagagttcttatgagatctggttgtttaaaagtgtgtagcacctccccctactctctctccctcctgccctgaccatgtaagacatgcctgcttcccctttgccttccaccaatgattttaagtttcctgaggcctccccagaagccaagaagatgctgccatgcttcctatacagcctatggaaacatgagccaatgaaacctcttttttctataaattaccttaggtatttcagagcaagaatggactaatgcggttggttagctagttaatcattggcttcgccctttagcccttcatacaggaaatacacaatggtatacaatgaatacccttcaggtccattcctgctgttcatgtttcaatcctcaatgtgaatatctggaagactcccttgctgagatttctgctgtatgtttctgggtgtgaaaaggaaccagggacatttaatatacaaaagaggaagtttagggaggccatgttaatttctctaaatacctgaaggactgcccagtggaaagaaagattaatctgcttccgacaaccaagccaatagatggaggttataggaaaaaaagagatgttagctaacaagaaagaacattctaatgatcatagctgcacaaggaggcctgctctgggagaaaatgagctctttgttttagagatattcaagcaaaggctaaatgataactggcaagatggccaacagaggggattcatgcttcagataagagttggccttgagcagtgatggctgtaaatttctctgtgggagcatctttgggcaccaactagtatgaaaggactactggcatttaagggagactttaataattgccttataattatatgttacacaatgcttcatataaaatgaagaagtaacagttatccttatcaaagcacaaagtgataggccgaaggtcattgctcattcattctacaaatgttcattgaacctttattatgcctagaaaagcagacacgtttctaggttttggggcaggatattgagcaagacaatgtttactctcttgagcaggcattctagtaggagacagggataggcctgtagacaaaagaaaaagtagatacaagtcaaggtagatatcttttaagacactccatcaacttatctttttaccacttcatctagggttcttttttccatgagtctctgctacaccatcctccaacactagtacagtcagattaaagggaaaacagctgatagacaataaattaagtctctggtcctgaaaaatgtgatgagtggatttctcctactagctgtttctctccttctctagattcaacatggaagagtaagaaccctctcattcacatgataaatactaaataaatacacaatgaaaaaaatagactgtattaccaatggccataataatacaaatatttctctgtattactcaggagaaaaagaatgtaaaattatctttttagatcaggtgtccatcgagtccctatgaaatgtctgtaaacgttcaaggtctaagtcgtacatttcctttggagtctctcatgaaactgaatcttctaaaccccccactgcttcgatcacaaaatagattcttggaagtgaaacaggcctgctaaaaactctcctttaagcaatgaaggatgtaaggaaactggaggagtttcaaagaataataacaagaatgattaaggggctgagagcatgatttatattgaatgattaaaaggattaaacatgcagaacttggccagtgctacacacttagttataaaaaacatcagaatcaagtgccaaagctctcagctcccatgaaaaatacaaatttgcatatgatttggcacatatttctaagtgaagttcagcagatctttaccgaggcagcattcatacaatgccaaaaccacttgtctggtcattttaaagtacagcctggtgatgtcagtaaaaacttgctatttgacttcattgaatagacaattaaaacaaaatgtgcccacccagggctgccatccacatgtgatgcatccataaagtatataaaataatgtaacacataatcatttactgtattagtctgttctcatgctgctataaagaactgcctgagactgggtaaatgataatggaaagaggtttaattgactcacagttccacagggctggggaggcctcaggaaacttaccatcatggcagaagaggatgcaaacatgtcctttacatggcggcaggaaggagaagaaggagaactgaggaaagggggaagcccctataaaaccaccagatcttgtgagaacttactcaccatcatgagaatagcatggaagaaatgcccccatgattcatttacctgccaccaggtccttcctatgccacgtggggattatgggaactacaattcaagatgagatttgggtgggaacacagccaaaccatatcatttaccctagagtcacaaaccaaaattcctacagatagcagacaggcaatcacatgagtgaagtgggctaagcataaagggtgcagggcctatgggttccagccaatgtttccatgtgggtattttggccaagagctgacagatcttcttgtctatcagatgacgccagtgattaagggtgctttcagcagcaagtaatgaaagagcaacacaaaaagggggagctggtggagccagttaccctagagctgcatatctccagagtaggaagaggaactactgggttaggaggagggaatagaaatcgatgtgaaaaggaaatcaagtggtagtcattagaatttaaaaatccatgttgttaatatttttaaaaatccactgacttaaaacacatggacagaaataccattctttggatattagcttgttgccacttatctggctaacttctttgttttagagctagaaaatagatccagggaaagggaaaaaacattctcaaatgcatagtaaatgtagatccagggaaagggaaaaaacattctcaaatgcatagtaaatggatcatcagaagaactgattagaagcagtggcctaggaaagaatatctgggttcttttctgattttgttgtcggagtgatttacttctaggttcataactttgaactttcttttcaattactttttattgtatagacaacataaaattttccatcttaactgttcttaagtttataacccagtgatgtcgagaaatacattgtgcaaacatcaccaccctccatctccagaaccttttttatcttgcaaaaatgaaactctgtatgtataaaacagtaagtctttattccctctccctgcaaccccagacaaccaccactctactatctgtctctttgaatttgagtactcttatgtaccccaaataaatggaatcatattttttttgtgattggcttatttcacttaccatgaagtcctcaagatttatctgtattgtagcatatgtcagaatttccttcctttttaagactgataatattccattgtatgtatataccacatttgctttatccattcatccatcagtgggtattaggttgcttctacctcttgtgaataatgttgcaatgaacagggtgtgcaaatatatttttgagatgctgttttcaattattttggatatgtacccagaagtgggattgttggatcatgtagtaattttacttttaatttttaaataaacctccatattgttttccatagaagctgcaccattttacattaacatgaagagtgcacaaggattccagtttctccatatccttgctaatgcttgcagttttttgatagtggccattctaatgggtgtgagatgatatctcactgtagttttaatttgattttcctgatgattagcaatgttgggcatcttttcatatgcttgcggaccatttgcatatatttggaaaaatgactgttcaagtcctttgactgtttttcaatcgcattgtttggtttttgttcttcagatttagaacaaaaacagaattctttatatgttctagatactacccctcatcagatacttaattgtatgtatttttttcccattctgtgggttggctttttactctgttgatagtatcttttgatgcacaaaaatttgaaattgacatgaaggcaatttgtccattttttcttttgttgcctgtgcctttcatgtcatctctaagaaatcattgtcaaatccaatgccatgaagactttgccataggttttcttttgagttttatacttttaggtgttacatttaggtctttgattcatttaatttttgcatataatatttggtaagagtccaatttcattcttttgcatgtggatgtacagttttcccagaaccattagtttaaaagactatcttttccctgttgaatgatgttagcctctttgttgaaaataagttaaccatatttgtgcaagtttatttggggattttctgttcaactccttggtctatatgtctgtatttcttcaagtgccatactttttttgattactgtagctttatagtaaattttgagatctggaagtatgactccttcaactttggcctttttaaaagttgttttagctatttggggttcttgaggttttatgttaatttttggatggatttttctatttatgaaaaaattatgattttgatagattgcattgaatctgtagatcactttgggtattattgacatctatcaatattgtcttccaacccataaacagagaatatctcttcgtttgtcttctttaatttctttcaccaatgttttgtggtttttatttacaagtctttcagctccttggataaattaatgcctaagtattttattctttttgatgctattgtaaataacattgttttcttatttttcaattgttcattgttagtataaagaaatgcaactgatttttgtgtgttgactttgtatcctactacttcactgaattcatttatttctatttttttggaatttttaaggttttcaatgtataagataaatcatctgtgaacagagataattttacttcttcttttccaaattagatgccatttacttcttgtcaattgacctggctagaatttattgtattatatgcactagaagtggtcaaagtggccatccttgtcttcctgacgttaaaggaagagttttcagtctttcaccatttagtatgagatttgctgtggggttttcatatatggcttttattttattgaggttatttccttctattcctagtttgtttagtgtttttttttaatcgtgaaactatttatagtttgtggagtgttgattttgaaaagtgacttttctgtgtcaattgaaataatcatgcacgttttttcttcattttgttaatgtggtgtattatgttgatcaactttcctatgttgaacacattcttggattctgggaataagtcccagctagtcattgtgtacaatcctcttaatatactgctgaatttgatttgctagtattttgctgaggagttttgcatcagtgttcacactattgcaataagcattgcattaatgttcatgatctgtagttttcttttcaatgtgaattctgttgatcattcaaataatcaagctttggtttcattgattttgtctattacttttccatcctccatttcacttacttccatgctaaactgtattatttccttctgctacctttgagtttagttttttttcctagttccttaagttgtaaagttactttgttgttttgagatccttcttgatttttaatatatttacagctataaattgtgtctttagcactgcttttgctgtgtctcataagtattggtgtgtcccaaaaatatgttccgttttgttttcattgatccccaagtagtttccaatttcccttgtggtttcttctttgatatatggctcgttaaagagaatattgttaaatttcacaaaaatatgcgaatttttcagttttcctaactgtaacggatttctaactttatcctgttgtggtcagagaagatactttgtatggtatctattttaaaatctattgggatatagacatatggtctatccttgaaaatgtcctatgtgcacttgagaaaaatgtgtatgttgttgagtacagtattctgaatatgtctgttagatatagttggtttattgtgttaattcctctaatttctaatgcatcttctgtctagttattctgcttgttattgagagtggcgaattaatgtctccaattattggaactatctgtttcttcctttaattttgtcagtttttacttcacatattttgatggtctgttattaggtgtgtaaatgtttataattattatatcttcttgctatagtagatcttttatgaatgtataatcttttttgtctcttgtaacctcttttgatttaaagtctattttgtctgatattggtatagccacccctgctctttttagattactgtttacatgaggtattttttcatccttccacttcaatctattagtgtctttggtgctagtgagtctcttgtagctagcacatggttagatcatgtttttctaaaaatgtattttgccaatctctatcatttgattatggagtttaatcatatacatttaaagtaattactggtaaggagggacttctgtcattttgttatttgttatttgttttatatcttttttggtccctgatttattgcattatagtattctttgtatttatagttgatttttggtagtgaaatgttttaagtcccttctcatttccttttctgtatgttttataggtattttcttcgtagttaacatgggaattaaatataaaatcctgaagttataacactctaatttgaatttataccattttaactttaataatataaaaaactactcctttacagctctgttcccatccctttcagttgatgtcacaaaattacatttttatacattgtatttccaaaacaataaactaataatattttaagccattagtctcttaaattatataaaaaacaaaatgtggaattacaagccaaagttacaataatactagcttttataattgcccatgtatttatttatcttaactgtgctctttattacttcctatggctctgagttaatgtctaacgtccttttgttttgacctgcagaactcccatcagcacttcctacagagaaagcctagtggtaacaaactccctcagcttttgtttatctgagagtgtcttaatttctccctcactttttaagaacagttttgccagatataagattcttggttgaaatttccttttcttttgcactgtatcaaccactgctttctgccctccaaagtttccaatgagaaatctgcagataatcctgttgtagagcccttgtatataatgaatggcttctctcttgctgcttttaagattctctgtctttggggtttgcagtttgataataatgtgcttaaattgagtttgttgagctcctcagatgtttacgtctctcatcaaatttgggaaacttttagtcattatttcttcaaataatctctttttccctttttcactctgctatccttctgggactcaccacaatgcatatgttggtccacttgatggtgtttcataggtgtcttaggctctgttgacttttcttcaatcttttttttttctgttcctcatacttgataattttaattgtcctatcttcaagtttgctgattcttctttttgctcaaatctagctttgaattcctctagtaaattttttatttcagtttttatgcttttcagatccagaatttatttttggattctttttaggtttccatctctttattggtatttctattttgttcatatgttattttattgactttatacatgtcttcctttagttttttgagaatctttaagatagttgttttgaagttttgtctagtagatctgtcttcaggtcttcttttgggaaatttctatttatttttttcttttgaatgaaatatattttcttatttcttcatatgccttgttatttcttttctgtcgaggtggccatttgaatctaataatgtgctaactctgaaattcggacattctttttcttaatgtttgctgttttttctaaattattattgttgcaggctgtttctgtgccaaatactggtctaaggcataaaattaagaccttctcagatattttctgagcctatgttttcctctgtgcatacacactgactttctaattttcctatatatgcggttgcttttgaatgccctagtcctccatgactggctcaaaaggggaaaaaaagagaaaagtaaaagcgaggagaaggcaacatcccttcaaatcttctggaagtcactttagtcagaaggtgaggggcttgcaacaatgggggaggtatgacaagaatggccacagactctgtctgtgcttctgtaatcagaagcagcaattagtgatcagaacacacatctacagtatttgaagaacacagccctttttggccactctggcttccgtactctattaagacccttagaaggaaaatacccctaagaattgtataattataatttcaacatgacaggcacatatatacatcagtgtacatttacatgcaagatagacatgaatgaagctttaataaaagggaagggtttttaaaataatttttataggactatctaggttggttgagtttgtgcactgcacaattctaggggcttcagtgtcaagtgcacattcaatttgtggcaccgagatgagatatcaggtgaaccctctgagccatgaagttggggggaattctattgttggaatgctgagatatcacagcccaaccatctaaaaatatatttgcctaattgccaagatttccttatatgttccctgcctacttgctgctacaatgacttctagagggagagaatcagagaagagttctggtgacaaaatggaaagtggttatacagcttcaaaaagatagaatgttcattctgacaggtaggacacaactttgagtaaggaaaagcagttgccattttcagaaaaaaaggaacatttggactaaacaccctgaaaaattttgacagcaagaattatgagattggggaaatatgtagtaaaggaagtggtggaaaccccatccctagagccatttgaaagtcaacgggataaggaagtagaaaatctattctaagaaagaatcttccactgcttcccctgggtctgacagatgacataatgggtctcctccatctctgattgttacagttctcagactttatgtattttccagggttttataatgttgctgttagaccaggctgcccacctccctctaaaaagaaaaaaaaaatcagactccaaacaaaccctaaactagttgctccaaggagtgcaaagatataccaaatggaaattgtgaatcataaaattctctagtgtgaatttcattattccctgaagatagtctaccaagatgagagacgttgtcatcattttactttatttatctgtttttctctttctggtacattttcatttcaggagagaaaaaccaatgggacagcaaattctcatagaactggctgaaaaggatctgtatttttttcttgctgtccacttattttccaacaagaaccctggctgtctttgtgatgactcaggaagaggaggatttgtgcacagccaagaggaaataggacctccatatttgccatttggatgcagagaatatgaacagacttctctgagacccaagaactgaagaaattgttgggtcctctcagtaaagtgggtctaagaagcatgtgtgaatgagtgttggttgggcatgcaggtgttgttaattgtgtttttgctcttttttatacatatctttgtgttatctacttacagttatagactcagatatggaagaaatctgagtctcactcagacaatttggggtttcattcttttttatatgtaaaatctaagaaataccctagtagttaagtgactcgtctgcaccgcccagttttctctctgtggcagcagctccaagggtaatctagtagcaaaatctagaaccatggcaaaaatgcagagagagaaatatatattttcatggaatcagtatacaacactaaatgtaactggccttttgggaaaaaaaaaaaggagggggcggtggaaacctggtctaacaatcgtctcagccctgtctggattgtggaaaagggcccatagcccaggcgctcttccatgattacatattaacatacatgcatgttggaaacctactatatatataattgctttatgtccacagtagattttaaattctttttttttccctagcaaacattcttctagagactctcaactttaatttgaaaaaaaggtaaaatctcatttgtcttgatgagggctacagtgtacccctagtgaccagatattccatactgaaatcattgctgtttctaactccagggccagtgaatctaggactagtgttgaaggggagagtgcagaatgaagaactattttccactcagttttgcctgtttacattttactactagaacctctcctttattgcttcgtttagaatctggattagcaaagcgtcaggagctttcatgtttatcacacaatttaaaatggaatgaaacacacaccatcacaaagcccaggtgttggattagaatttttttttttttgctttaaaaatggtttttatttctatttttattttatttattttttcttcaactttcattttaagtcccagggtacatgtgcaggatgtgcaggtttgttacataagtaaacaggtgccatggtggtttgctccacagatcacctaggtactaagccaagcatccattaactatttttcctgatgctctccctgcccccacccccactgaaaggcccccgtgtgtgttgttccccaccatgtgtccacatgttctcatcattcagttaccacttataagtgagaacatacggtgctcagttttctgttcctgcgttagtttgctgaggatagcatcttccaactatccgtgtccctgcaaagaatgtgatctccttcctttttatggctgcatattattctttggtgtatatgtatcacattttctctatccagtcaattattgatgagcatttggatcaattccatgtatttgctactgtgaatagtgctgcaatgaacatatgtatgcatgtgtctttataacagaattgtttacattcctttgggtacatacccagtaataagattgctgggtcaaatgttatttctgcctttaggtctttgaggaatcactattttgtcttccaccgtggatgaactaatttatactcccaccaacagtgtaaaagcatttctttttctctgcaaccttgccagcatctgttatttattgactttttaataatggccattttgattggcgtgagctggtaactcattgtggttttgatttgtatttctctaatgatcagtgatgttgagctctttgtgtatataaattgtgtgattccaactcagtgctgtctaaccctcaaccctccttgccctcctctcttccgttccccttcagaaatgtctgaatccagtttttcttcagaatactttctccaggcaatgttggaagttttctttccaacttccagtcttttctgctctgtcttgatcaataaacgtgttcttttgcttgtagcctagggccaaagcctgtgtgttaaagtgatgttgtcacaaaatgcctggtgatgtcataaagcactgggagatctggcaaaagcagcaatcctcatttttatgtccccagaaaattattggtacccaaagggccatcacatcttctgtctatgcaccagttgttgtagaaatagtgaaggcctagttaacttcgtgcatttacatgtttgacagatttctataaaagactgtgtagagaatatagatttaaggagccgaagttattaaaatggggtggggtgagaggaactaggccaataaaagcagacaacgtggttttttaatcctttccacaggaattcaggcaaaaggggaataaaataattctacagggtcacttgtaattcagcttaaactaagctcaggaaactgaataatatttctcagaaggctgatttatgcacttaaagtaactaagtcccaggtgtcataggaagtaatacaacatctagcaatgtcctagcctgcatgctcaaactagctgcctaaataaatttctaacttctctttaaaacatttcagagtgagttctactgggattgctacagccctagattctctgttagaaggggctgcctcagtaagaaaagcccagggacctaggtaggttctgcattataaacaaattgtgttccaaagtttgtctgtgaatcatttctttggaaacctaaacatattttctttacagaaacagaggtagacacagttaggctccctggctttcataaccctccaaagtctatttaaaccatatgcaggtcaaatcccctctgctacataaaaactagagaataatcacttaatcacacaaaccaagggagaggagatcagatttaataaatgttttttttcatttattccctcccccctccatttatcccttaattagaagagggtaagtgatagatggaaatttggtggatgtcctgacggagatttccaacactttcaaggattttagacgccaatggcacagattctttattaactaattatgcataatttatcttttatgacagagaaaatagcaaggaaagtggctcagcagagaaaggaaagggaaatacctagcaatttctatgggaaaaaaaaggccctttcagggtaactgttattgctatatcaggacatcttggaagctaagtgtttcaaagtcaaatgtacttggagccatgaagcttcatttttctctttggttccagtgacctcacttacccaggtctttattaggcatgctaataaaaagtaaaataaaaacagttttggcagtctatgtcttttttttccctcaaaaatgccctgaagtggtggtacagagtggaattaacacatcctaaatgcaggcagtcggaaggagacagaagagaaacaaagggctggataccccacatactggataagaagagcctgataacggagttgactgtatttggaatttgcctgtttccttctgtaaaggagacagggagctgaatgaagtgcttatctaagaagtgtcagaacccttgcgcaatgttgttacaaggatgttagtaaagcagggggaacgttttggcaggtacagatgggattctgtttgacggaatgtattttcttgctatgtgttaatctgtgctcttctggtatcaagcccttaaggagtttggataaagcctttagggaacccacctttaaccctctctttagtatacattacaaggaatttagcatcccatatgtgacacggatggaactaaataattgcagtggggtgttgggagaaaatcaccctaaagcaggcaactcctgcctagaaattatagctggagaaatctggctaagcaagaaatctctggaatattccacatgagactaagggataggttgatggatttctaacaggttacacccaactccaagtgagaagtcatttgaaagagtcccagctggacgtcacaggcccctaatgagagaacacaatgaagccagtatatccacatgaaaaagttgaattcaaagaggactctaagagggcctagacaaagcagtttggagtttcagaggagcaaacaccattccataaggtcttcaatcttaacccactgaaacaatgtaaaagtcttctcttccctctatttaagtcagagcaagtttttagcagaatttaaactcaaaagatgaggaaaaagaccacattccacaagagtaactaaaatgatagtaaaagagaagcaatttttgtctccataaaaataaccttggagttgcagttcacagcacctaaaaagcacactaccatgtacttagcaccaaaggaatatcagatgaagtgagatttctaaagtaatgcagatcaagggcaaagggaatagctcgtggtcaagaacaaatgtaaaggaatgacatgggtaactacagaatcaagagagtcacccagagggaaagaaaactcattggaatatgtgacgggcaggaattagtgatgaagagagaataccaaacaagaaaagggagacgtggggcattgagaatggatggcaggagataagctactctattccctgtgggtttgatcttccctgataaagaaaattgtgtccaaattcggaaggataaaataaacactgtaaaggagaaactgaagcccaagataggtgaatcatttcaaaaggcatctagctcctaaaatacatgcaaatgtttaggtctagatacatttgccctaaactacaaagaaaactttgcagattgaatttatttttttaattacttaaaaataattagagggggagccaagatggttgactagatgcagccaggaagagcttctccctcaaaaagagacaagactgcccagtagactggcacactctgcacagatctttagagggatggcattgagagtggacagtgggaggacatggaccgtgggctgaagggtggggaggggaagctgggaacctcgcacaagattcctgagcgctaggactctttcctggccctgagcaactcctactgaaaaggtgagtgaaacaggtgtggagtggcccactcttgtaatggacctctggtatcctagccacaggagaccccaagacccccataaacatctgagctggcaggaggaactgcccaaagagttggcagagacagaactccagcctgcccatagccccaaaggtttggcatgggagtggctggagtagagagtacggccatgggcacccattccccaggcttgccatattcttctaggtggttctagcctttgttgactgtctgacctgggcagaacagggctgtcttgtccctgggatagggacagtctgacctgagcaccccctgtcttccagcctcttccagggtccctgcgtggccacatctgcttgcagtgcagcctcagcttgccagtgaccactgccatatctctcttgccagcagaccctgcctaacagagcactttggcagatagaccccacccgcacctaccagcagccttcccctgccggagcacacttgcttgcagcctcccctggctgctccactagtgcacacacgtgcatcaaaccccacctccctgccagcatgcatatacttggggacgcctaccatctcaccagagtgcttttgccagcatctcctgtcagagtgttgttgccagcagactgtgaacaccttgatgcctctagcacagcaggtgcttgacttggagggaccagagaacaaagttgctggcctggtgccagccctacaagattagagcatgtagtctaggaatactgagctgagctttggccccctgaaagcattcagaaatgaagcccatcaactaaacctaacttatatcatgaccaaaccctcaagggcgcaaagaatataaaagcaaaaggcttcatttgaaaggcagcaacttcaaagattcaaagaacatcagcccacacagatgagaaagaaccagcacaaaaattcctgcaactctaaaagccagagtgttgtcttatctccaaacaactgtactagttccccagcaatggttcttaaccaggatgaaatggttgaaatgacagacatagaatttggaatctctatggcaagaaagcccatggacatacagaggaaggttgaaacccaatctcaggaaatcagtttgagttgaaagatgacatagccattttaagaaagaaccacattgaacttttggaaatgaaaactgcattataggaatttcagaatttaattggaagcactaataaccgaatagattaagctgaggaaaatctcagcttgaaggcaattccttcaaattaatggaggcagacaaacattttaaaatatgattttaaaaatgagtgaaacctctgagaaatacgggattatgtaacgaaaccaaacctatcatttactggcacattcctgacaaagatggagagagagcaagcaacttggaaaacatatttgaggatactgtccatgaaaatttccccagtctcactagagaggtcaacatgcaaattcaggaaacccagagaacccctgccagatgctatacaagatgacatagagtcatcaagacacacagtcatcagattctccaaagtcaccacaaaatttaaaaattttaagggagctagagagatggtgcatgttttctgcaaagggaaccctattaggctaacagaggatctttcagcagaagccttataggccagaatagactaggggactcatctttaaaaaaagaaattccaaactagaatttcatatccaaccaaactaagctttataagtttataaggagaacaaaatcctttcagacaagcagatactaagggaattcattaccaccaggcctgccttacaagaggtcctgaagggagtgctaaacctgaaaatgaaagactgataacccgccaccacaaaacacacaagtaaatagaccactgacgttataaagaaacaatacaatgcaagtttacataacaaccagctaacaacatgatgccaggatcaaattctcacatatcaatattaaccttgaatgtaaatgggctaaacaccccactaaaaagacagaaagtggcaaattggataaagaagaaagacccggctgagtgcagtggctcatgcctataatcccagcactttgggatgccaaggtgggtggatcactagagtccaggagttcaagaccagcctggccactatggcaaaaccccatctctactaaaaatacaaaagttagtggcacatgtctgtaatcccagcttctcgggaggctgaggcatgagaatcacttgaacctgggaggtggaggttgcagtgagccaagatcatgccactgcactccagcctgggtgacagagggagactctgtcaaacaaaaaaaaaaaaaaaaaaaaaaaaagaagaaagactcaattgttagcctgttgatgctgtctgcatgagacccatctcaagtgcaatgacaaccataggctcaaagtaaaaggaagggaaagatacatcaagcaaatggaaaacaaaagaaagcaggttgctattcttcagacaaaatagatttttaaaccaacaatgatcaaaaaggataaataagagtattacataatgataaggagttcaattcaattcaacaataaagcttaactattctaaaggtatatatacctaacactggagcacccagatttataaaacaaggttttgaagacctacaaagagacttaaataaccacaaaataatgatgggagacttaaacaccccactgacagtgttagatcactgagacagaaaactaacaaatatatttgggacttaaacatgacacttaaccaaataaacctaacagacatctacagaatacttcacccaacaaaaacagaatatacattcttctcatttgcacatggcacatactctaagactgaccacatgctcagccataaagcaattcttgacaaattcaaaaaaccaaaatcataccaaccacactcttgtaccgcaacccaataaaaatagaaattaatgagaagaaaatctcccaaaccatacgattacatggaaattaaacaacctgctcctgaatgacttttgggtaaagaatgaaattaaggcagaaatccaaaaattctttgaaactaatgaaaatgaagatatattgtatcacaacctctgggacacagctaaagtagtgttaagaggacagttagcactgaacacctatatcaagaagttagaaagatctcaaattaacctaacatcactctagaactgaacaaagttgtgacacaaaaattcatacaaaaggtcaatgaagccaaaattgatcatctaaaagtataaataaaattagtagaccactagctgattaataaagaaaaagaaatccaaataaacacaatcagaaataacaaaggtgacatcaccactgatcccacaagaatacaaaaaaccctcagacactattatgaacacctctatgcatacaaattagaaaacctagaagaaatagataaattcctgccaacatacaacctcccactattgaaccaggaagaaactgaaatactgaacagatccataatgagttttaaaatttaatcagtaacaaacctatcaaccagaaaaagccctagaccagacacattcacagctgcattctaccagacatataaagaagagctagtaccaattttgctgaaattatttgaaaacatcaaggaggaaggattcctccctagctcattctatgaggccagcatcattctaataccaaaacctggcagagacacaataaaagaaaactttaggccaatattcctgataaacatacatttaatgctcctcaacaaaacactaacaaatcaaatccagcagcacatcaagaagctaatgcaccacaatcaagcaggctttatccctgggataaaagatttgttcaacatacgcaaatcaataaatgggattcatcacataaacagaactaaaagcaaaaacaacataatcatttcaatagattcagaaaagacttacagtaaaattcaataccccttcatatctaaaactctcaacaaactaggcactgaaggaacatacctcaaaataagaggcatgtatgacaaacccacagccaacatcatactgaatgggcgaaagctggaagcattccctccgagaactggagcaagacaaggatgcccatgctaaccactcttattcaacaaaatactggaagtcctagccaaagcaatcagtcaagagaaagagagaaaaagcatccaaataagaggaagtcaaactatctctcttcacagacactatgattctatccctagaaaaccttaaagactctgcccaaaggctcctagaactgataaacaacttcagtaaaatttcaggatacaaaatcaatgtacaaacatcagcatttctatacaccaataatgtccaagctgaatgccaaatcaagaattcaatcccattcacaatagccacaaaaacagtaaaatatctggaaatacatataaccaaggaggtaaaagttctctacaacaagaattttaaaacactgccaaaataaatcagagatgacggaaacaaatagaaaaacattccatgctcatggattggaagaattaatattggtaaaatggccgtactccctaaagcaatttacagattcagtgctacttctgtcgagctaccaatgtcacttttcacagaattagaaaaaaatattctaaaattcatatggaaccaaaagagaagcctaaatagccaaagcaatcctaagcaaaaagaataaagttggaggcatcacatgatccaatttcaaattatactgcaaaggtacaataagcaaaacagcatggtactggtacaaaaaccgacacataggccaatggaacaggttagagaacccagaaataaagctgcatgcctataaccatctgatcttcaacaaagtcaacaataacaaacaatggaaaaaggattcgctattcaataaatggaggtgggatatctggctagccatacgcagaagattaaaattgaaccccttcctttcagcatacacaaaaatcaactcaagatgaaggaaagactttactttaaaacttgaaaaacagtagaaaacttaggacatacccttttagacgtaggccttggtaaagatttcatgatgaagtctccaaaagcaattgcaacaaaaacgaaaatagacaagtgggacctaaaaaagagcctctgggccaggcgcggtggctgacgcctgtaatcccagcactttgggaggccgaggcggttggatcacaaggtcgggagatcaagaccatcctggctaacacggtgaaaccccgtctctactaaaaatacaaaaaattagctgggcacggtggagggtgcctgtagtcccagctacttgggaggctgaggcaggagaatggcatgaacccgggaggtggagtttgcagtaagccaagatagtgccactgcagtctggcctgggcgaaagggtgagactccatctaaaaaaaaaaaaaacaaaaacaacagcttctgcagagcaaaagaaagtataccagagtaaacagacaatccacaaaatgggagaaaattatttacaaaccatgcatctgacaaacgtctagtatccagaatctttaaggaacttacacaaatcaacaaaaaataaacctaatacaaaatgggcagacacgtctcaaaagaaggcatacaagtggccaacaaacatatgaaaaaatgctccacatcactaatcatcagagaaatgtgaatcaatactacaataagacaccatctcacaccagtcagaatggttattattaaaaagtcaaaaaataacagatgttggcaaggttgcagagaaaaaggagtgcttatacacggctttggggaatgtaaattagttcagccactgtgggaaacagtttggagatttctcaaagaacttaaaatagatccagcaatctcatcactgggtatatatcaaatgaatagaaattgttctaccaaaaaggcacatccacacatatgttcattgtagcactattcacaatggtaatggaatcaacctagatgcccatcaatggtgtactggatgaagaaaatgtggtacatatataccatggaatactatgtagccacaaaaaagaacaaaatcatgtcctttgcagcaacacagatgaagctggaggccattatcctaagcaaattaacacaggaacagaaaaccaaataccacatcttctcacttgtgagagctaaacatttaatatatgaacactaaaaggaaaatagacaccagtgcctacttgagggtggagggtaggaagagggtgagtcaaaaaaccagctatcatgtgctatgctcattacctgggtaatgaaatagtttgtacaccattccacagtgactcacagtttacccatgtaacaaacctgcacacgtatcccctcaacctaaaacgaaagttaaaaaattaaaaataattttagtaataggaaagtacaaagaaatatacagggaggctctgtgcaaatttcacccagcctctcccagtgtttggagatacaatttttaaaaccactgacgttcgtttttgagaatttgtagagaacagcaggaatggtaccaacaaatcaaatgatgaacaaacattttcagaattttcaaaagtgttgagaaggtagtttctgaaatctattcttttgtggtaatgttagagatgtctgttaaattctagaaatggttaatcaatttttggattttttatgatgcagccatactaggaaccagaataatctcactgtgaacaagttggaccatttactttttttcgagaaaatttcttgactgataaaccaaattactctttgtctacattacatctgttttgtctagcatatttaaaaacctcttttattatacatctattgacaaattggttttaactatagtttagttagatgagttcatagcaagatactaacgaatcaggatcaaaatggaaagtctgtctaacagtgtgtcacagggctttgcacaaactagtgatgactgaacaaaaatggaaaatgactttgatttttggaagactaggttgaaaccaccacgatgaattttgattcttttaaaagaaccatactatagaactacaaggtctgagaaaagcgctttaatagcaataattgtaaaaattttggagttctagttgatatttcaatatgaatcataagtggggaaaaactgagtaagtttagccattatgcatctatcgcaagagaggataaagtcacactgtagtttgcactgtcaaaacctacctggaatatcgtgatcaactacaggtcccaattttaagaaggacattgacaaatcattactcacctaaagaaaggtggagccagcaatggtggcttatgcctgtaatcttagcactttggaaggctgaggtatgaggattgcttgagtccagattttcaagaccagcctgggcaacaaagtgagacactgcctctacaaaataaataaaaaattagccaggcatggtggcatgtgcctgtagtcacagttacttgggaggctgaggcaggaggattgcttgagctcaggagttcaaggctgccatgagctatgatcacactactgcactccagccagggtggactctggttctaaatttaaaaaagagagacagagagaaaggtaagggttttggatacactttttaaaaagagattgaagcagctgggtttatcatagttgtcttcatacatgggaagggctatgatgtcatagattagaataattctctgtggcctaaggtgtagaaatagtcccaaaacatggaagatgcaataaatactcttaagttaatctaaggaaaatattttacaagctagagacagaggcatcatatttcagcagatcaattgatttgagtgtttgaaacataagggaaagatgtggaagaaatatatacatttgggaatcggcctatagtttaaatgatacaactagagagtgtgtgtagatcagatgttcacttcccaggatatatttcatcctagggtatctttaatcagctacagggaagccacattttatttgtatgtgcaattctccagggagatgatctctaattaatagttcccagtgttctaaagatcccataaccataaaatttaaactttccttacatgtagtcagacaaaaaaaaacattgaccaacaaaagggcacttgaggtgcactaacttaaagtgcaggtagaggaatgagaagaaacaacgagagaaccataaggacaactgtgtaaaaatacagtgacagaattcaatgaaaggaaatttaatggtgagagtgaacagcagtttgaatgctttggaaaggtttcacatgacaaaactcagaacatgcctcgaagaggtgagacatacatctcaaacaaggtaaatgatatgcaaagcaacaacacaagagctgtcaggaagccaagtggcagaccaatttaaaataaatggtgcagaaaaagctgtgaggtcagaagaaggaaagttttagtggagagagctgaaggttgaaggaaacccttgtacagatggtcgaacataagctagatttgcaagtcattacacttgttattttattccaatgaatggtatttttatagttaaacttctttcatcttattctgtctcctgagtaaaaacacatccttcacagaagtacctacatgtttgaggatgactattacgtctctctcgaccttcttgcctctaatttcaagaattctttccaatgaagagccccacagaacttgattagaagtcaggatttgacttgagaggatatgaagagcctcttctagattctgtgtgagttgtatcatgaccccctgaaaagtttcaagaatagcattttgcatcacaatatttcatgcagaaaagactgggaaaaggaaaatgtaagtctcttatgcttggtctctggccacagcagtggaaatccagaggaaggggcagacctgagaaacactggcaaggaaggattgcagagcttggtcatgaacaggatgcatgatggctgagatagcagagattgaactctccttcactttgtgacggttttagcagccccagtgctcagacgggtgcaacttggattaaagaccagcattcagttgccacatctttttattacacaagcagtacaggcctgtaaaagacaaccatggaagggaatatgaaaactacagagcaaggaatattaaaagaatcttttgactggattttgttttctggtttctgaaatgaaagtgaaagtgtccaaaaggatctaaggtgtctcttacagagtttggttcagaaaatcctctaaggattagcttaggaagcccaaggaactgtgtgtcaatcctctgcctatctgttgtttgtcattgttgtttgtttgtttgtttgttttttgagacaaggtctcactctgccacccaggctagagtatggtgtgatcacaggtcaccccaggctcaagcaatcctcctacttcagcctcctgagtagctgagactacaagaacacactatttattttttttattttttatttttttcattttatttttagttttattttgtagagacagggttttaccatgttgcccaggctggtcttgaactcctgggctcaagcagttgtcctgccttggcctcccaaagtgctgggattacaggcatgaaccaccacactcagctctctgtccatctctaaatgggaacaggagaataaagaagtgggggaaaaagggacacttcactcagaagaaagggcactaattatctggcacaggtatctgaaatgaaattgacatttgttgagcctctactagggatcaggcacttaatgtaccttgtttactgtcttggttactaatagtccttggaaagactctttttcctatggagaaataaacagcctacctgtacaggatgcatctgtcctctctcagagaaataatgtctcaagaaaaagaatcatgagactttaggggaaaggctagtttcagaatataatctgtgcaaaaacgaggttgaggttagaccttatgagcaaagcatatttgttcacagtggatagaatcataagagatcctgtggtctccttcctctatgaagataatgtactactgtcattatgccatccttttaaaacaaggcacccaggcccaggcaggagagcttggaactatgatggcaacttgcttcctgctctgtgatacctcctaccagttttctccaccctgcaagtctccgccagagtttgtaaacctggagtaccagtggcatatttcacaccctgacttctacattttgcaggaatgttggaacgatttctactgtgcattctcagtagaaatcaacttgcatgcactgacttatttgacctccatatatctgacattttccatcccagttgaaaagacaggactactgtatatcactacagtttcctcagagtccatgaggaagactcagtaatggcagagagtgggtaaaccaccttctctcagagatgtagcacttgaaagaggttgcttgcttccagagcttgctggaaaataaatgtaggtatatcctttcatgctgggtggatttagctgcattccccagaagactaatatttcttctgagggttattttcttgaaatccttatgaatgtttgaaaaggggtccctatagagaaaactacctcagtcacatgcacaagggcctctgaattatgttgcaatttctagtgtgaatgctatgttagagtgcagtatcatgggtgacgatgaaaatgcacccaagtcaagaaatttaaatttatgatttcagcaacagtcttaacttttcccactctcgtatgctcagtgctttatgttattgtagttccagtgaaatttatgcctcagtgtgcattgcaagtgagttatggctactctgggaatgttaattttgcatttcctgacttctgtgtgttcaaagggacaagctttcaaaactggcctacaaaatagcacaccagaccagctgatgctgtgtacctccctgtgcctgtggaatgggagtgagaagacctcacggctgggtcttctttgtgtctattcctaggtctatattttacaggagcatggctcaggtggggaatgtcctgccttacatgggcattcaatccaggcaagaagtatgaggcaatggaaaaggaagatcacatggattacttgttatttcctcttctttttctttttctttaaagacagggtcttgctctgtcacccaggctggagtgcagtggtgtgatcatagcttactataactttgaactcctgggcttaagtaacttgttgttattgatagctatcatttattgagcacctactctatgccaggaattgttctaaatgtttcacttttgtgtttcatgttgctttttatcaaccatttgaggcaggttttatcatcccagcactgagtgagatagacagtcgtaagtttgctcaaggtcacctgactagtagagccagaattcagatctaatttttttttttttttttttttttttagatggagtctcactctgtcgcccaggctggagtgcagtggcatgatctcggctcattgcaagcttcgcctcccgggttcaggccattctcctgcctcagcctcctgagtagctgggactacaggcacctgtaaccacacccagctaattttttgtatttttagtagagatggggtttcaccatgttagccaggacggtcttgatctcctgacctcgtaatccacccgcctcagcctcccaaagtgctgggattataggcgtgagccaccgcacctggcctagatctagttttactgaccacaatgtccatgctctacctggggcttgcctctccagtccccaagtcctgaaatgcaatttcagctcagccctcgctagctgtgtaattttcactaggcctttaaccttggtttcttcattggtgagacaaagaacatgttggcataagtaggatcaaatttaattatgactttgctattttcattgctctctgttaaggacatcaagcccacaattgttggttcagccaaagagaaagggccaagaaagaaaggtctatctatatttatcattggttacatgctaatgagggccagcatttttgcctgttttgttcatatttgtccagtgcctcgaggagtgcttagtatagagacattcagtattgtttgttgattgaataaattatttccattatgccatctctcaccccacagtctctcttctgtttcctatcatcttgggcacagttgtgtgttctggacgttggacattttctgtcttctttcaaaaatcgtcttgcccaatcactacagcaacttactttctgcttaggaactgacatcttgctccagaaacaatttagtgtttctactcttgggaatttgcaaagcaacagatgttttctgcatactgtatctaaacccacagcaatttgaatagtgagacttcctgatactgtgccaggctctgaggaatagattttggagacagatatttggcacccctaaaattttagtaggcctaggtccagcctcgtccatgtcagtggcagttgggccaaattcaccgagtcagacattcctgccctcaggagaccccaccaccccacaagctgtggtttctaagaagcactgaagtttgtatatccagcacctttgcaattgtgttagtaacttcttctgccttatgaagaagttttctgaaatgccttaccctttctgaaggagcttttcaggttccagacattaattcttgtgcttctaggtcctatagccaacaatcagcctcaatacccttccaatcatgtccacattaccatccactaaatttggggctctctgctgctttgtgatattgtcatctttttcttgctctgctggagcagatgatctcaatatcattatccttatggcaaggttttaaaattcactctttctaaaatgactcattggcactcctataaatggtccattgcctctagctcatgaggtctcactgcactcttcatttcttagcaaggctgacttcctcccagaatgctgttcttgctcctgataactcctagactccctcactcctccccttcccagttccctaagtatacttgctcagttttgttctgacattaaaaaaggcaaggttatgaaactagtgaggaagtaacttttagtggtgaaaacaagaccttgaggtataaatcacaactttgccacttaatatctgggtgagagggagcaagttgttattgctcttttagacccagtttctcatctgttgagctagacaacaatgccctttttgtggggattggtctatcattggtaagtgcccattgaatgtttcttattcctagtgaataagagtcatactgcagatttcctggaagaagtattttattgacaataaaaaaataataaaagagctgtcattcagattttttttaaggggactgaagggggaagagactgcagaaagaaatattgtcataattgtgaaagttactgtgtttagtaatttgactttctttgtaatcaataaagtaaagaaacatattttggtttttcagtgtgtttttgagtgtgtgtgtgtgtttcatttgagcttaaagtttctttttcttgtcagaagcagtaaattcattcatccctttcaacaaaattttagagaatgcctattgtgtgtcttatactctgtaaagtgctgactaatgcagactcccatgcaggcaaaacagaaaatcacaatgaatgattataattgtgacaaatgccaccacagtgtctcatagagagttcatttttgcggcctcctgcttgtgttacaggaaatggaagcatttatgggagatgttctgaaggggatttccccctggctcttctccctgtcagaaggggacatctcctttgaagtgtctcatattatgggaagacagagctatccagaaagcaactagctgaagcttcaggcagttgtagggaagggagggcacttgggattgttgtcctaataatttaaagaaccctcagaagatttcaaaagccagggagatgtgtgccatgaatatgaagccagttttttggtttttgatttttgttttctccacgcatttgcacagatgcagcagggatggatgacgggtggtgtgatgtcactagtgaatgatatcaaaggaaagagctctgggtaatcaccagggctagtctatttatctggatagacttgtttagacttgtttaagtctaaataagtgttgttcgttagtttgttctggtagctgaatatatctttggaatctaagattctatatgcacatatgtacatacatgtccctttacggggattccttgttcttcagctaaatgccatctaacaacaagctaattgaaaacagtctcagtatctaggtcagtgaattaaatggattccatgccaccacccatccccaacacaacacacatatacacacacactgacacactgcagatacattctttcttttttcttttttttgaagatgagatctccctctcttacccaggctatagtgcaatggtatgatcacagctcactgcagcctcaaactcctgggctcgagtgatcctcccacctcagcctcctcagtggctgggactacaggcaagcaccaccatgcctggctaatattttacttttattttgtagagacggggtatttctatgttgcccaggctggtcttgaactttgggactcaataaatcttcccactacagcctccaaaagtgctgagattacaagtgtgagccacccgccatacctgtctcagatacattattttagcaacctttcctcgtttaatttttgcgatagtccaaattctaaatgttctgcttaatttttggacattgtgtcaaaccatgtgtcctgatttggcacttacaattatacaatctttccatgaatattaaatctcagtatttctctaggacattcaacagtttctttagtggcattgctttgctgtcccagtagtcctggttttctttttgtccttggtagcccccatcaactctgcttttcaatattccctaatgaaatacctctccagggattggtagttcccaccctgatgtcaccatctgaccctagagacctaaagtagtgttacagtgagtaaggtcggagtatgacaagacaaccctctggaggtcatcccagttctgtagtttgtctccaggtccttctcatgagtggatcgtgaatagccaggaaagtagaggttagctattcctatgatctgaagttctccaatctaattgtgaatcttgttgtgccaccttgaatgagtcacccaatcctctgtggctcagaggattgggtatcctctgaaaaagggggatacgatttgtaccagcttcatggtgttgctgcgaggatgaggtgagttaatacatttaattagaccagtgactggaaaatagaaggcacgatataagtatcttcttttaatgttattactgctactatcactactataatttatcagtattagtagaagtgctaaggtgcagtgacacaagccctcttagaaagctcatatgagcacaggaaggaaagaagagagaaagtaagaaggcaactttaacaaagaccaaagcactccttttccctccacactgaactacaggttaatgatgaggttatcatgacccggttggatcgcaagggctgttccagcagctgacatctgttctagaacctatccttttttctccttgtttgcctctgcttgtatggtcacctcaccccgcaccacattgctagctgtctctctttactctgactcagccagcaggcatctcaaaactcaacacagggaaatccacagccaagcatcacaactttatctcttgtcttttcttctcactctttgtggtacaacgttccttccaatgcagttgtgggtctctattaacacttctgtggctttctccccaccccatcaactctgtaaccaatcactacatatgcactgtaatttaggctggaatctgagctttgacttttaccaagaaattatgtatttctaaatattggcctttggttctactacttgggtctaaaggacatgttcacatatttcctgtctattcagatgactggtaacttgggtgattaaatgtttttcagattgttttattttacttaaactctaacctccttctctaatgcttgaattatttttttttcaagagattggccaatttgtgtttggttgtctagggaaaaaagtgtctgagagcgattagatgaagccaacttgctttcagaaaatgtaattttcttaagatactagagcatgatgacttcctttctttgacacaaatatgccttatctagacctactaatgagattaacctagaaaatggacgtgcaaaatggggagtttgttttaaactttgacatacaccagttgaaaaaaattctgagaaatttttaactaaaaaaaattcaagccaggtacagtggtgcatgcctgtaatcccagctactcagggggctgagaagtgatgatcacttgagaccagtattggaggccagcttgagcaacatagcaagagcctttctctaaaaaagacattcaagtggtaacagagagcaatttagtaaaaatcattacattcagaattttcaaatataaaaagaaaaaaagaaaatgctagctaagggaaaataaaagcagcttgcagtccacagtgactgccagtgtcaagcaggaacttcattggccttggacagggtgttctagatgtcacagtgtcaggcaatcaacagacggctgtctgataactgtaacttttgccacagtccctggtcacagcagctgatgtgaaggatgtatgatgaaagtgtgtacattattaggaatgcagaagttagaacagccaaatgctaaatggcaggtggacagacaaaaaaaaaaatgtgcttttattctgttccaaggtgcttaattttggttaatcctttgctttctactgatcacacacaaccttcttcaattctagacaccattgcatatgggcacttaacacttttaaatatactatgtattgtgtcttacttattttattttctgttccttatcccccactactgttgtgggaagtcagggaccccgaacggagggactggctgaagccatggcagaagaacataaatcatggacatttattagttccccaaattagtacttttataatttcttatgcctgtctttactgcaatctctgaatataaattgtgaagatttcatggacatttatcacttccccaatcaatactcttgtgatttcctatgcctgtctttactttaatctcttaatcccatcaactttgtaagctgaggaggatgtatgtcacctcgggaccctgtgatgattgcgttaactgcacaaattgtttaaacaatatgaaatctgggcaccttgaaaaaagaacaggataacagcgatgttcagggaaaaagagaaataaccattaggtctggctgcctgagagctgggcagaacagagccatatttctcttctttcaaaaacaaataggagaaatatcgctgaattctttttctcagcaaggaacagccctgagatatagaatgtgtggctaggggtaggtctctaaaatggcagctttgggaatgtctgtcttttacttttatagataagggattaaataagccctggtctcctgtagcactcccaggcttattaggacaaggacattcccgcctaataaattttggtcagaccggttgtctgctctcaaaccctgtctcctgataagatgttatcaatgacaatgcgtgcccgaaacttcattagtaattttaatttcgccccagtcctgtgatctcgccctgcctccatttgccttgtgatattttattaccttatgaagcatgtggtctctgtgacccacaccctattcgtacactccctccccttttgaaaatcactaataaaaacttgctggttttgaggcttggggggcatcacggaacctgccaacatgtgacatctcccctggacacccagctttaaaatttctctcttttgtactcttgccctttatttctcagaccagctgacagggaaaatagaaaaggacccatgttgaaatatcagggctgaatttcccccgatacactacaatgtaagctcagttagagcaggggagttccatctgttttgttcactcctatatctctcacccagaatagttagtgcctggcacatagtaggtgctcaataaatattggttgagcaagcatgtgatttccttgcagttccacaaacaaaacactactcaccttaacctccaacagaatacccagattccagacacaatgatctttcttagaatcatggatcttttgagcctaaagaaactaggaggttctacagtccaatcccttaattttactgataaagaggctgaagtccagagtttcagcggattgctccagcacataacaaatcaaacaaataaccaggaatagaaattgagacttctggcccactgctctttttccattaatttcagcataaacccattcccattgctgaaatagcagtggcctcatccatcataggagcataacccttgggagttctcttgggtgaagagctccatgacactgagcctgctctgggatcgttttggtggctcatatgttttcccagtcgaagacaatgaattccatgttgttgaaagctttcattctaccttcaagtcttcagacacgcagattctcctctccctccctccaccagattctagctcaagctctactcatcccatgaagttttgccccttgaatccagcccatattgatgtcatgttcctctgctttgctgtagttgtaataggatgataaatccaaaggcctgtagaggccaatttagtaaagtaaataaagaaaactgcccagggtgagaaatgaaatcccaggatcactagatccttccacttttaaagaagctatagtttcccagagttaagttcccaccgtcactgatctctttagctttttgctccttcctttcaggaattcaaaggaagaatgtggtctccaggggcattcccagccctaccatctcccctctgggtgccctccttcactgcagttcaccctgtaractttattcacatcaccaccaaggtgattccctgacaatgtgaacctcagtgagaggtgaacagagaggactccctgctcctcctctttcagacccaggagctgtctttagccccattctgaagaccacccttttcctgtatttccatccgggctttggtcaagtaagcattcctaaatcccttagagatgagggctcttctcctttctgggtctagggstacatcattttgccttcaggtttgaattsctgttccttcagcctcatttctcactgattgcactgttttccctggagatggctttgaggacatcctggaggagccgtgctggggtgtcagcctgccaccctcccctgggcagctgccctgcctgccttcttaacctcacgttggactttcctgttttctctccctttcattcatctttgccaagagatgattcttttaacaccctgactctggatcaaattgttttctatctcctgaagcttctcttcatttgagcttctcttcacttttgactttttttgctcatcgctatttgaaaacggagctatttctacttctttgaattctgaatgttcttctaagggatccaaataaccatcaacatgtaagaaaagckgtctckgtctttctctgagttcttctctaatcactgagagaactataggatatacacagtcatctttgaaaaacccatctcttgggtagtctyttgacctcccagtccctttgtaggaacatctctgctgaagcctgtccctagcatagacaggctgttcttgctttagagcctgaaatgtgtgcgtctcttttccttgactcagaagaaatgaatttaagagatacatattgttttaatcaaaaactttttttcatttaaccagtaatacagatagtttcaagctatcatcctttctcttcttccctgggacaaacatcacttattccagtaagcaggaaagatattttatggcttcaatgacgcacattttatcaagctgtcaactaaactttgtgaattatttgtatggagtattttggtgttgatgtctgggggcaaggtcaggtcaggattgctaaagacgagactaggagacttcatcaaccagattgtgaagattcttgaataccatataaaagggtctggaattttacctagagagaacacatacatttaggtaagagtgctaggttttagaataaaataatgtgatggcaggaaggaagatgatttttaaagatagaaactaggattaggaagacaagccatggtcatggatacagaaaatagtgacagatttgagggaaagaattggcaggatttgaggtaggtgaggaaaagggagggattctatttggtgggggggatttcagatataaagagaaagatggatgatttgagagcaggatggttgctctaaaggtaaactttcagatggttctaaagtcatctctgcagtaggctatttcttcagaggtctagtggacttctcacagaccaccaggagaacaaatgaaaagtcttggtggctgaggccacctcctttccccactttgtaaaacaggaggaatataagggtgccttcatgggataactgttcacaaagctatctgaactctggttagaaacacaaagaaattataaatgtttgagttgattgatatgctaattaccctgatttgataactatacattatacatatcaaaacatcactatgtactccatatatatctgcaattttatgtgtcaattaaaattttttaaaaatctgttaattagagtctattggaaatttcactactggcattaaaaatcagagcctgtgctgctgaaatttatattctccactggtaacctaggaattgaagtgctgttcaagttttcaaaaacaagcatgaagcattaagaaaaatgcaattgtcaacagaaggaagtaaaatagaaagtagatacaactccctatgatcagcctgaggtagagtcagaccctggccaaacccacagcaaacttcataaatttaaaaataattttctaagtgcttacaaatccattgtattatgatctttttttaaaaaggaaaagtcattttatccccctgttatctaatgctatctatcatctaatagatactcttgaggaaaaacatctgttaatacccctgagcattcttcattgtaccctaaacacatgagaattccctttcgtaagtaattgaccttcattatcattgtgacattattcttattctgggaaccaagctctctgattgggagtcccaccctgggttaaccttagtccctatggttccttcctttagccaagtttttgtttgttttgttttgttttgcttccaggactctccaccatcccattcatgtacccctcccgatagggggttagtggccacacctggcctgcaaacctgaagatttaagatgcacagtgtcgctatttgaccttcatttttggaggctataggattttagagtgatagcttttctctttcaacactctaaagctgttctatttttcttttctggtttgcattgtttctgatgaggtctgcagtttcccttatttgtttcatagtattatttattattgtaaagtttcttctttcctctggctgtttgtaagattttattttatcttctctttctagtaattttattatgatgtatatttatgtggttactattctggggagtttgccaagattcttagatctgttaggttacagttttcaaaaagtgtcaaacaatttgtccattggttcttcaattttttttctccttctaccttgttttggacttcagtaatatatatgttagactaattattattgtcctatgggtcgctggctctctatttctttattttttttcagtctttttaaatatctattcctcagtttgtataacttctattgctctatctttaaatttactaattttctcttttacagtatctaatcagctgataattctgtctagcatgctgataattctatccatggaattttttttattttcataatttttagctgtaaaagttctgttttattctttttcaatcttctatttttctcattagtttcatggttattcytctaaatctatcaacatatttatgaaagcaattgtaaagtctactaaattgatcatgtctgttatttctggatctatttctgccatgaatatttctccaggttatactgaacatttttctttacatacctcaacatttttgtttggatgttgaatattaaattatcaggtctagattttgttgtcttctccttaaagaacattgaacaattttgttttggcagatacttaagtaatttgcaaatcaacttgatcctttcaagtctacttttaaaattttgttaggtcagatctaragtarcctttaccttagagttggttcagctctaatactaagatatgattcttctggagtctctcctgaatatctgagtttctaatgcattgtctctaagaactttaatgtctcccaaccctgtgtaagctctaggaatttgtcagattaaaactcaccagtagttttggcatactatgtatgacagtttcacccacacatgtccagtgtactacgggcatcaggtcaagtggacttagatgcagagttctgaagttctacttctgtatacgtktctctcctcaggtactctgtcatctgaattccaacctcctttgcctcctctaatttcagcatctgtattttaagtkaagggagaacttcctgctttacttgaatttctttccttgtcccatgatctggacatgcttctaggtagaaatccagaaccaatgcagggctcactgcatttaccttttctcatggatcacagtcctgaacttcattttatcaaagatctaaaaacagctatttcatattgttttttaatattttatttatgatgcaaaggcaagtccagtagaagttactctgatatggccagaagtggaaatcttatctgcataatgtattaaaattcaagatttacataaaaatccatatatatatatatatatatatatatatatatatatataatctctttttgaaaagtagaaagatctaaacagttctacctttcatgaaatttattgactgaagttgatttgcaagtgtccacttcttggttgaatatgcatgcccaagttttctcatttccaccaagataatgtcactcattttgcctgctgcttttattctataactacaaccacaaatttattctataaagtaatactagtcagtatttttgatcaaatgatgacaatctttccaatgcaggtaaaaaagcaaaactttaaaatgatagcattttatacaatattccaaaacatataccatcaagcgttacaggaatgtgcaagatattatggtggcacaaagatggcaatgaaacacattttgaattgaataacaatttttaagtattttgagatggcaatattgaagaggaagctatctagctacttgtttacctgtaagataaatatggtgaaaagaaattgttggaagatgcttactaatgcacagttgttggcatattgttcccaaaatggcatcgatgatgatcattaatcatgactagtttggcggttttcatccaaatcctgtcctatactctttactaaatctggatgtcctgttttggcagccccattagccttccagatccttagacttaaacctgcagtcaactgggttttctctttcttcttgatccttcctatccagtaaattgagattactgacttgaggctggatgctgtggttcacgcctgtaatcccagaactttggtaggctgaggcgggcagatcaattgaggtcaggagttggagaccagccagaccaacatggtgaaaccctgtttttactaaaaatacaaaaattagctgggtgtggtcgtgggtgcctgtaatcccagctactcgggaggctgaggctggagaattacttgaacccaacaggaagaggttgcagtgagccgaaatcacaccactgtactccagcctgggtgacagaggtagaatccatctcaaaaaaaaaaaaaaaaaaaaattactgacttgaccttgaccttcatagtttctctcctatctcttcctactctttgtattaccgatgtctatctttgctcagtccctgcttccccagctagtttccacaataaatattgccaaatattaatcttcctaatataaactggtgtcatattacttccctggttacaaaccttctgtgtttcctcatggtttataaaatgaactaaaaacttcctattctttcaaggtctaccacaatttacccacagacttgctctcatcttatttcttactattctcatttatgtatattacctctaagatatcaagaaatgttaattagagctgaaataaatatgtatcctaaagaggcctcgaatctttcaaattcctccttactttgtccatgccattgcctctgtttgatgtgtttataccagtattttatgggtccaaactctactgttactcaaaattcagctcagttactaacccgtatatatcttccccatttcccccattttaaagcttttcttttgactatgggacaactttagcaatttatctgtttgtattgagttgcaacttatcacttattaccttgtattattgttatttgcatacacatatattcttacatgtcttgataatggattatttccctgaaggcaggattcatgttcattattctgtcctttacatccccttgcatggtaccttgttggtccttgataaatattaagaggatgaatacttctctgagttctgtgatgcagtcttctaacactatcactttcattgcaagtaaatatgttggttaccagaataatcatatacatttagtattttttccttccgtttactttttaatattcacatatattcacgtttattatggtaatatcgaactctgacattgtcctcagtacaattttgtgttttataaggggcctgatttgaaaaaaagaaggaagagaaaccaaagatctgaaacccacaggctcttttcttaatcatgaatcttggcagtgagagttgcaatatgttgccacctattaattaaatctgtactctggtgaattggccaagagagagaacattaaaaaaaaaaagaaagaaaataactaagaaggatgaggagcataataagtctaggaaaccacttgagtaatcagaaactttcatgtagaaataccccggccatacctttttcctaggggctgtgagaaaactgcagggaagtctgaaggccaagaaagaacctaaaattttggctggtgagtcaccactaaaatattacatagcctcaaaacatgttaataaataacactgaaccaaaagtaagagccaattatgagcttaatcagaaacagagagtaagatatggatgaaattttagagaccatctagatttcagaacattgctaatcattactgaaaaacagatctcttggaacatctgttgacagctatgaaccctgcctttaggaaaatgcacataaaaacaaaattagtcttaggttgagatcttttgattcagagcacatttcatcattaaaggcatgaaaaacacatttcgggaagagctggcaatcagctcaagatcacataggaagttagtgacagggaggtagtgtctgaaaagtgcctacagaactcaagctcctgtcttgggattcatccaacacattttctctcatgtgtagtagcattccatgcataaagtaatcgattttatttgagtaaaacttgcttagttttttgctttctagaagggaaaccaaaataaaaatgtaatgtcttttgtgctaggcactatactgggtccttccacatgtaccattttactactcccacagccatagataatattcttatttcacaacgaggaaatgaatattaagagagattaaggtgactttcccaaatcaatacagatactataaaatagggtttagatatgaagccatagctctacctcagttttggtgatttcttttttctatgcctccttacctttcactctgctatgctgattctctgggaaggctttttttgatctggcaaatgaaataaggcttactgatactactacaacaaaaatgattgcacacatttaaagacataagaactttatatagaaaagccaccaacagaactgtttgggaatgtctgtataccttctctggcacaatttttccagttattatttgagctaagtgtacccatttctttcctccctgtttaaaatattatccagcactgaccacacagctggtagaactgttttggagaaccacccattaatatgtaccaaaagccttaaaattttgcctgcattctgtcctgggaattctacttctattaatttatcctaaggaaatcattgaccaacaaatagccaacaaatgtatgaacatgaatgtctaaaatagtttattatgacttaaaaattataatatgaaacaaactagggatctagaaatagaaaagtatggcatattcatacaacgttaaatatgcagccattagaagtgatgttgtagatatatgtttattgaaatgtaaatattctcatggtgtaatttcatagctaagggttgtattgtacctgaattattgtttttaaactctattacatgaccatgtattattgacctattattgatacatatatacattgtttccattttttaatgtactataatgatcttcatgtgggatctaggcagtgactctaccttgttcacttcttttccaaatacctttccttctaaagaaaggggtctctatgcctttactttcgtcttatgggaacttccctatgtggcaatttacattctatccacactactgataatggtaaaaccttatcatctaggttagtcagatttagcacttgaaatacaaaagagagattatgaaacttagaaacttttttccccactcaccaaaccttggcttccaagacaatttctttgctgtggaatcaaaaattctatttttgaagtagaaatctgaatattggctctttctctttgagcttctgctttaaaatcttaatttgtccccagatcaatggaggcctccacatgaataggttacaaagatatgggaaaagataaaagtatatttattcatattttagcacaccaacatggtgcatgtatacatatgtaacaaacctgcacattgtgcacatgtaccctagaacttaaagtataataaaaaaaattaaccccattaatcattaactttattgtttaatttgaaagggagaaggatctttataatgagcttttctatacaagcacatgctgtatcttttaaattagttaggtcttcttatatatcctaaaatatgttataattttcttcacaaacatacatttattatcacatttatttctaagcagcacagagtggtggttgctgttgtgtgatcttttccttctccattttattttcaaattattgacagtgttttggaaaataacttattttttaagttcatcttgtacatagctgccttgttgaaatcttttatttattatttttgtttgtttgtttttgaaacaaaacaaacagagtctctttctgttgcccaggttggaatgcagtggagggatcatggctcactgcacccatgaccttctgggctcgggtgatcctcccacctcagcctcccaagtagctgggaatacaggtgcacaccaccacatccagctaattttttgcattttttatagagaagagatttcaccatgttgcccagtctggtctagaactcctgggctccagtgttccaccagcttcagcctcccaaaatattgggattacaggtgggagccaccactcctggcagaaatatttaatcttttccaatctttttcttagacattgtgagagattcttcttttgtatgccctagatagacaatagagacaatctaatctctttctttttaataggggtttcactaatttctcattgtgtgttttacattagttagaaccttagggaaaataagaaagtgttgaagtgtagctgtgatataggataactagatcacttttttaagcttaaaaaaacccctttactataaatggctaatagtttacaattaggtgtcatgtttctgttagttatccatccaggctatgggattttctttccgttccaagtgacaaagtattttaattttaaaaagaatcagaaatgggtggtatctatcattaagataatcatgttttttctcccttagcttttggtttattgaattacatggatggatttcccaatgttcaaaccttcttatattcctcagtaaatcctaattggtcacagtatattattagatttaacttgtgaatactttggtattttgtatcatagcgtttgctagcaagactggcctatagttgggatgatgtccatcaatttctatgctttggaatagttgatgtaacataagaattacattctcctggatattttggtacactataatgccaagggagaaaagcaatttattgaccattatgtataatatgatccattcttgaaaatacaaatacacatatgacaaaatctgaaggaacatatcaaaggttaataatatttctgagaagcttcattattgttgttttttcttgctttttctcaactataatttttagtatgtctatagtggatgcagacattctgggggaaatataggagggtcaaatgttatatggggtaaaaatataaaaagcatggtagttagaagccactgattctgggaatatgctctgagctctccaagcaagagcatcttgcactaaagatttctgtgccaaactttgtgctccagataacagatccccgtttccagaacctgcacccaatatctgtactcacctccaaattttgacctggctcctgctagtctgacccttttgtagaccttctgataccagtctctttatagatactgcatttttttctgacgtttgggcatcttttggctatggcagtgccccctgtacccactgtcctctcatggcttcattcatgtggtcataactcatctcactgcctctcagttgggagctgacacttgatttggtaaaggaaacagtgtgagagtgtctgggtctcctttctttagccttatatcaagctctttctcagatatatactttgcttcatctgaattaaaaaaaaaacccatgaggaatcatggctactaactgaaatttacttttattttttgacttgaaagcaaaacagtgattttccccagtgagtctatcgatacgggataaagtactgtagcttcagagttcttatttggtctttccaaagttttatactttagagttaggattctcagtagattttccagtcatttagaaataacccagggcagcaaatatgatctgctttaataggatgaacgagtttaggctacagcacattgcagcttggggaatcctgctcaccttatctatccctctctttatggtctgcggataccgcatggtgagtattctcagaattgccaagtctgcaaacatactgccacttaaagcagtctccttggtcagaaaggtgctttctcccatatgttctcagaggactgatagaggtgtccccctggagttatgaaaataaagtcttcccttctttctagtcatttgacataaggcaattttagtctctgtgtctcatgtttaagggccttcctctgaaatctgaaaaactcgttttaaattgttagggtgttgcagtttcttaccatatttcaggcaaagttcttcccactcgggtcatcagcctcacctttgtgggattccaaattgagtggcaatacagtgtagcagttaagaaaatggactctagaatggattgcctgggttcaaaatggccaccacaactttaattgtgtttacttgaccaaattaatttttcttttttcacccttctttctcaatctgtaaaattggggaaaataatagcacctactttattatgttgttgggaaatgtaaatgagaaaattttttaaaagttctaagcaagagtgtctggcatatggcaatttgtcagtaagtgctatctcttcttattttcatcaagtgaaggtgtacccaaggcaatgttcagaaacattggctcctggcacaggagtcatgccccaacctcattgctctcattgtgcaaacacaccttccctgtccattgcagaattccatacctgctccacaggctcacagttttgctctccatagcatcagctgagaatctgaaaacaaaacatcctgttctcatagtttttcaacctcttcatcttcggtgaccttctctttcgctcatgccttgccatctgcactcataaccacactgattatcactagaaactgtatcatcttttaatttgttaattgatgctcacttcctaacacaacatccgcccttcctcttaactttctaaaatgtcctcacctccacaggacttggacctcatccaatactgcctaatgccctctccctatcattttcagtcgctgagttccttctgttcttctcctgtctccgtattcagctagattttgtgatattccattatgttcctgctcttgtccagctcatcttccattgtacctccttccaaaaatgccagctgtttgataaatctaacctccagtactcagtgctcaggacaccttaatgaaaataagggggaaaaaagctgagataaataggtagaacaagagaaaagaaaaatctctgcctaagagggaaggtattccagatgatcttgttatgggattttcatatatatatacattttagcaatctaacatgacagccttaaattgctgactcatagcattacttagaaatgaatttgaaccttggaaaactgcagagttcagtttgtaattttccaaacctcttgatctcaaattcaaaatgtaaattttataagattagacttcaaaagacttcactgtaatatagtacttaacaattattgggaggtggaaggggctgtatcatgtcttccataatcacatatttggtccttttcaaatattccaaaaagccatttgaaaatgtagtgtgtgtgtgtgtgtgtgtgtgtgtgtgtgtgtgtgtgtgtgtgtgtagtttgtattagggaagaagttagaatacaccttatgaggaaaaaagaaacaaaaaacacaaacaaatttagagaaacaaatcatattgattgttcattatgtgccgtgtctaatagtctcactatattttaaaaagaactagttccagcttaaaaaaaaaaataagggaataaggctcaagttccttttctctccatacaagcttgttttctaaactcaactcacatatttttttaaaagacacttttcacacactggataaatgcctcactctgcactgagtggtgaaatgagggcaggtcagggggagagctatgtctggcaatccacctgcctctgttaagaacttttattatccatgaaatttatctttggcactttcttttctaaataaattttccatctctgcttgcatcagaaatgaaaagactgaaaccacgttctttgccagctttttactttttatgaaaacagttagtaccttttacaagagaatttaatttgcaatggtgtcttcactgcaagtagagagaatgaaggaagataaaggaagacaaaggagaagaaatgaggatcaagagggaacagatggcaaaatagcatctacagtgtgcccagcatcctgctcagagctttagcaggtgtcagcaaactatcgcaaggacaaaaaaccaaacaccgcatgttctcactcataggtgggaactgaacaatgagaacacatggacacaggaaggggaacatcatacactggggactgttgtgggatggggggagaggggagggatagtattaggagatatacctaatgctaaatgacgagttaatgggtgcagcacaccaacatggcacatgtatacatatgtaactaacctgcacgtcgtgcacatgtgccctaaaacttaaagtataataataataaaataaaaaataaaaataaaaataaaatagaaagtaagatgcggccaggcacggtggctcacgcctgtaatcccagcacttcgggaggctgaggtgggtggatcacctgaggtcagcagttcaagaccagcctggccaacatggttgaaaccccatctctactaaaaatacaaaaataagctgggcattttggcgtgcacctgtaatccaagctatgcaggaggctgaggcaggagcattgcttgaacctgggaggcggagattgcagtgagccaagatggtgtcattaaaatccagcctggatggcagagcaaaacttcatctcaaaataaaaaaaaaaaaaaagaagtaagatgctcccccccctcaaagaagacatatggctatcacatgcaggttggcatgaaagtcaacacctccgataattcttcttttctttactgtgaaaccaccctgccccagtctcctgcatatttggtcattcaagtgcacaaataggaaaatagaacgttagagagggaaaagatcttagagcttcccctgctcctaactttatgttatatacagataaagaaactgaggctcagggatgggacacttcgaggacacagagttgttgacattgctgatttgaactaaagccttggacttctctccaaactttctgatggagcatgaaagcaagaaattacggagtaaaaattattctttctaagaaaatatatatatttgattcttctaatagatcagggccagtaaactacagcctctggaccacatctggcctgctgtttttgatagtttgttagatcacggtcacactcatagagttttgtattgacaatggctgctttcatgctacaacataattacaatgtaattacaatgtaatgatgacagcctgtatacctgcaaaggttaaaatatttgctacttgtccctttgtagaaaaaatgtttgctgacccttaacctagcttaatactttgtgaggccagggaatatcactgctttgtccaccactgtatccctagcatctagcttgatgggtcttcaaaactttgtttaataagaaattgataaattaggtcaactcaaatatccaagtgaaaatttgtagagttggataaacaatggagaactttaaagtgatctgagtgaacagataagttttagaggctttgaagattttgcagtttgaattaatttctgcccaagtgccatgtttgtgcagagtaaaggtaagaatagtacctcctgtctaacttaattctccactgtccttttttactgtcttaggtgttgcttgccaaatattcaaatttttcccatttggggctgggccatgtggctagttttagtggatgagtttaagtggaagttgagatatgtcgttttcaagcagcgcagttctttggtaagaccctccagagttctgtgttttagtcacagttaccaaaaatgctcccaatagtgaccgatctatcaacctgggcccctgatgcagaaatgggcaggcagaatggaggtcgcacctgaatctcaatgacatgtagtataagccacagataatattcctgctatatttatttgtatgctaatttttcaagaaagcaaatgtcacctccccacctaaatacaaatcccttgacaccatccaaaaccatgcttatcactcaccgaattcctcaaaacacctcttaacttgatttgaatggatcacagtcctgatacattatttattcagtctttcaataagtctttaatgatgcctactgtgtgtatggaagagattgactagttgttaatcaaacctttttccttttcctcctggacatacagtcagaccacatttcccagtctctcctatagctacatgtaatcttgtgactgacttccagccagtgaaatgtgggtagagtaattctgaatgagttctctcctggcatgtaaaaatatcctgccttgactcccactttctttctttccttatttattgattgccttgtgatgatagcagagcctccatcaggctaagtttttgaaggactgtgtggagtagaatttccagtcctttcacatccacctaccatttggactttacttgaatgaggaataaagcttttattgtggtatgccattgagagttaaggttttaactttacagctgctagcattaccttaactaagaaagcaatctgggagtgagggattacaacttttaacatatggtcaggaagttctcattaagaaggtgacactggagcaaacttgtaagagcagagggagaagctgtgtaaacatgtggagaaagaatggtctaggcagagggaacggtgtgtgcaaagtccctgaggcaaaagcacgcctggcatggtcaaggatggcagtcagctcagtgtgatttaaacaaaggatggtggatgaagtaaatgagagcagaaagatgttgccagattttacagggcttgacaactttataatacaattctagccactgaaactaggcttgtagtttatatgcccaaagggcattttttattttttatttttatttttttgagatggagtctcactttgtcacccaggctggtgtgcagtggcatgatctcagctcactgcaacctctgcctcccaggttcaaatgattctcctgtctcagcctcctgagtagccgggattacaggcatgtaccaccatacccagctaatttttgtatttttagtagagatggggtttcaccatgttggccaggctggtcttgaactcctgacctcagtgatctacccgcctcggccttccaaagatctgggattataggcgtgaaccaccgctccaggccccattgtgctctttttcaagcccatgctgaatcatatgactgcatctgagtatcttatactaaatgataaaataaatgatagtataaatgaactctccttgttataatattatgggcacacttttaggcttcatactccattttaactttcctttgcaagtatagcaaaattctgtgctcatatagattcagagaaaggagttaatacaacttaactatttcctatgaatcaggatataggcacaactaaatcatgacttttcctacaagaagggagaaaaacttaaaatcactccatacctcatacagactcataggatgttagtgattgctgtcagtgcaatgggaggtcaatatgagattttccaaatatttcattccactctggaatttgtcttaacaattgtcttttcaggtgagcttaaggtgaaaaaagataactgaatgcctgttcttctattccctaaatataattaagtcaagaggcttactggacacggccattagtattagttttctgtcatcttaatatctaaatagcataaaattaagtagtttactatagttacaaaatgaccagtagtagaaaaatgaatgagcaaatgctgcaaatagaaaatttataaaaggagaaagtaaaatgcctagtatgtaactgaaaaatatctaattggcacagtaataaaaacttcagggatgtacaccattttaaaaagtatcaatttggtaaatttaaataaatcataatgacccttttagacaaacataggaaaattgctctctcgtacaatagtggtataacaatgtaaactaaaaaaaagagagaacaatttggaaatatatactgaaattcttaaaagtatacatgattcctagctctgcccactgagaaggcctagaattaatacaactctagtggcaatgagcacaactagtgcctagatcttggttagtcaataccattcaccagtcaaagaaaccaaggctccttgaagaaatggtttattttggggctgagcagaaaaaacacaaagtaagaaacctgaagcaccccacagtgccagaaagttagaaaagagaaacaaagaatgtaggaccccaaactgaaagagttggccaaaggcagaaaacatgagaaacaaataaataaagactgtattggattgtaagtcaaagaatcaataaatgttttggatccatactaatgaccagtcaagcaagtaaccaatcatttaatggagaagaggaaatctcttacatgagaattccaagcaatgtatgcggtggacttagtgacttggttccaaagaataaagtatggaaatagaaaaattgtagctgtggaaaaatttagcagacaccactttaaccaagtggtaaagatgaagattaccagtaataagtcgtgatgacatcaggtgctctcttatatgatgcaatgagaagattaccacaactctcttccctcaaatactaataatcctagtctaataatgacaaaacatcagataaaccccaaatgaggatgttcagctaaatacctgataagttctcttcaaaaacgtcaaggtcttgtaacataaggaaagcctaagttgtcacagactttaggcgacaaaggagacatgaggactaatggaatataggatcctggattggatcctggaagatggaaggtcaatgtatggaaaaactggtgaaatcttcataaagtctatagtttagaaaaaaacattttgatcaagcagtattactcctaggtaattatcctgtggaaactcttatgatgtatgatatcagttctcaaactttagcatataacaaaatcacctgcagggactgctataatcaaatttctgggctccggtcccaaaattgttatccaatatatctgcagggagcaagggccggaaaatttgcatttctaaccagttttcaggtgctgctgctcaactgatctgggaatctcactttgataaaccctgacatatgtaaacatttgctataagaatatttactgtcataattatgtattggattacataatttttcttctcttctcttctcttcttttctttttttgagacagggtctcactctatcgcccaagctagagtccagtggtacaatctaggctcactgcaacctccgcctcctgggttcaagtgatactcctgcctcaacctctcgagtagctgggattacaggcacctgctaccacacccagctaatgtttgtatttttggtagagatggggttttgccatatagctcaggctggtgtggaactcctggtcacaagtaatttgcccacctcaacctcccaaagtgcggggattacaagcgtgagccaccgtgtccggccatttactatctttttcttattaatgttttcaaacatttaaaaatattttcaaatgcttctataatatttgtactgcttttgcagtaagataaaaatattagtttaagttaaaaaggcaaccctttcggacatgatgttcttaatatttagatgagatttttgtgtttccgaaggatggctgatgcacagggaattcttttagtggctgctttttaaaactaatgttcaattcattaaagtgacaaattaaaaaccctagttttcccttaagcttttaagtttaacctaaaaataacattatcacagttataagtctactgatacttaacagtcatttccaagataactaattaatattttgacactcttctgaatattctgtcccatttacaaacatagctaaactgccttaaaataatttaaacttcatttataaatttaatataatagattctattactatatattttaaatatctgttcaacaagcaaaactttcccagatcctttgacattgcaagttaatgtattaaattatactttaaaaacataatataatctcaagttctttaaaatagcctaacattatttataaacagtcaaaatctcatacatttcaacttaaaattccaagtctaaactgaatgactcaactacatgttttatgtttcctcataaagctaatcttttagaattttaaaatgccaaattcttttaaatgtgacaatcatttgaaatgctggaaacccagattattcctaaacctaacataaatgatcagttcgatggctctgatttagttttttgtatatgtgctgttgtgggctgtcttgtatgtccagcctcaaccctcaaattcatatgttgacatccaaaccctcactatctcagtatatgaccttatctggagatgaggtctttacagaccttaagattaagttaaaatgagggaacagagagtgataccataagaaggtgggaagaatgcactttgaagaccatgttggccatttcacaagttggggagagcaggtgagctgagagctgataactgaaaggaagtcagtatgaagcagcaaaaagaacttagctcctcattgggaggagtaaaatgtgttaatagacaaacaccctagtgaagttaatgtattcatccattccacatgtaaaacacactcatttggaataagtgacgttatctagcagagtccactgttagcatattcataatccctgagtaactgagaaagacagtttttctgagcccctgtattggtttcttttttttttttgttttgcttccccactcccctaaagatcctgcctggaattgcctctcaaactacatgcactcaagtccttggtttgatattccaatctatgacagtaatgcacatttataaaattgtatctggagagagaaagctaatctggatattttgggggatggtggtaagggagcaatctcctattgttgtagtataaaaaaacagtgaatttggagtcggaaaacttgtattggaatcttaattctatcatgtattagatcagtgcacttgggaaatggacctctttgaatccccaaatcctagtttataaaatgaaggtaataaatgattatcaaatgaggtaatctatgccaaagtgtccagcacatagtaggtactcaggaaataggaatttcctttcttattgtttatatatttgtgttattgaaacatagttgaaaagataatgtgatgttgtagagagaaaaggttctatatcaaacaaacttacttttaacttcagtcctggcttcagaccatgatcctgggtccagtattcaatagaagaaatagtagctttcccctcttccagaactaagattattagaggcctttgtattaaagagatagagagattttactctaacagatgtccaaatgtgtatgatgtaatctgaattgtaatgtggaattaaaatatggcataccatgatcccatccatcaattcaaacacccttcttcaatttgatgttaaaagctttattactttatgattgtggaaaatttgtagacaatgtattagaacaaaaatccattgcaatgtgttagcacaaatctgaattttaggctcaataggccagtcttttgatagatttatcaagtgacttgtatctgaatggttaatcaggtgtattgataatgctggacaactcagagccatattgtatatgcaatattcacacacatatacacacacactagggtatttatttaacatgtatatgattgttagtttatgtcagtcactttagttccaagaatcaaagaacttggccctattagccagaacttaattgtcttggtcacttatccctgctgaagacagaatgattattaatcctgaattttataagggtccattcactgatattggcaatgtgttcctaattttaaaaatcattgattttactctattcaagcaaatgttaatttggatgtagaacttgaaggcttaactttgtcacactgatcattgggctttgcagggattaaaaactaaatgtgaaaattctctcagtgaagttgtgttgaattcaattttgagctattacctgtacatggaaaacatgaataatgaaataatagtaggtattttaaaaagaacacatattttatggcattatcctaaatactttatgcacaacataccaatatattctcataacctgcatatagagtaaggccatcccattttcagtgagaaaacagaggttacgggaagagaaattattatccatggccttgtgctaatagatgttagaatggggctttggaacagataccattgacttcaaaatttttgtactcactagtaccctataatgattcatgatcaaacaaaattttacctaaaattccaagagtctcacaacagccttccaatcttgtgcctgggcccaaggactctgggccaagaatctttttactagttgctgccactcatgcatgccccagcttctcggcttctccagagtttaatcccttcattaaaaaccaccattgttctcttttgttgacaaatttgagatgtcctttttgattttgacatgaagggaccctggataaggcctcatctcctttctagctccattcccttatgggctttgtctccacttcagaactacatgacttccaattcagtcaaacagagcttcttgctattctccctgtaccagcttctgagggctgcggtaacaaaggcccacagactgggcggcttaaacagcagaaatgtattgcctcacagttctggaggcggaagcctgaaatcaacatgacagccgggctggttcctcctgagggccatcagggaggaatctgttccaggtctctccttcaacttctagtgctttgctggcaatctttggtgttccttggttcctgctgcaccctacccccaatctctgcactcattttcacatggtattctccttccatgcttgtttttgttgaaatttccctgttttataaggacaccattcatactggattaggggctcaccttattccagtatgacttcatccggtcatcctaattacaccgtcaatgaccctatttcatttttttttttctttctttttttttttttgagacagagtctcgctctgttgcccaggctggagtatagtgtcgtgattttggctcaatgcaacctctgcctcctgggttcaagtgattatcctgcctcagcctctgagtagttgggattacaggcacctgccaccacccctggataatttttgtattttcaatagaaatggggtttgattatgttggccaggctggtcttgaattcctgacctcaagtgatcctcccacctcggcctcccaaagtggtgggattacaggcgtgagccagtgcacccagccccaatgaccctatttctaactaaggtcacattccatggcactggggctagagcctcaacatatgactttcaggcaaacacaattcaaactataacacctcctggtacaccaaacagttctgtgttttcagccccagaggaggctcttttaggctgttctttccctactactttagagtgaatttctagtcaacatttaaggctgtccccaaagtaaatgtttttgcgaagaaatctctaactcttgcaggttgttggttaccatttccaaacctgaaggaagctctttttgatttgatagccctccttacacgtgagggtataagttgtcatttcttttgaaacagtaagcccttcaagggcggtatccaggtctttttcacttctgtctctttagtgctatcacggtgtctggcacacagtgagtgaccagtaaaagttgtggagtgagtaaaccaaacattctccttactatattagggtccttctaactttctggtaaaggacaagtaaggggtggtcttcttgagactattaatcttacaaaatatgagacttcatgtttaaggatatgggtattgaaaacttttgcttggctaaataaaataaaagagctaagaggaaatttctggtgaaattgtctgatggcatttctcatgtccaatgtctaaaatttgccaagcttcagcttcatgcagtctctcccacttcctggctggtgtttagccattccagaggtcgaccagatgcttgcacagctgtcttgtgtgctcttgacactttccaaagttaggctacacatcaggaatgagaagctatgaactttcctggtaatttttccagggccggccatctcaaaatgtgtcttgcttgttggtatccacaggctcaaaccagttggaatttgaaggcaaatcccagctaactacttcattcgaggtggaaactgtaatgataaatgcgtgactccattaagcagagtctctgtggtggaaacacagtgatgaatgcaattctgagttctatcagtcctactgggatacaagttgtttagtagtcacaaatggcttagccataatgcagtcagcattcccaaagtaaagcatttccattcctgttactacaaaggataaattagctcctacaagggagggaatagaaatagctcctcaaacactgtctttaagaagttgcttaaaaccctcaccatgactgtctccatcacagacagctgtgttatttgttgattttaatactgatgatttgcattcacgtaataaggactcagaattactttacaaatagtctcattacaccttgcactgctgttgcaaagtaagtacatggttaattgtattttgttcatttttctaggcaggatcaggagccattgagtttaatttacctagagcatacactgatttaataatacacaagattgagaaaacaactgcaaagtaatgtggtttattttcttaacagacattctagaaattcaatatcacaatctagaatataaatgaaatgtccttatttaaatgttgctgacattgccagaatttagctttgggtagccttagtggtaaaagtacatgatttgtcctttggcattttagaaatggtcagacgacatccagaaccaagtctggtgaatacagtgtgtggccccactgcctgacagagattggtgatcagaaataaaacactgatttctattcaggtataccttctaatgtagctgttctgtaaattttcacattgcctgaaatgttttcaaatacagcagcattactggaaaaagtatatacagcctctcaagagatgtgtatgataagtcagcatttgaatatataggtttgggtatattttctcttaatagccccttggccaggcacagtggctcacacctttaatctcagcactttgggaggtcgaagtgggaggatcacttgaggtcaggaattcaagaccagccgggccaacatggtgaaaccccatcactactaaaaatacaaaaattagccatgtgtgggggcacgcacctgtaatcccagctactcgggaggctgggcaggagaatcacttgaacccaggaggcagaggttgcagtgagccaagatcacacaactacactccgcctgggtgatagagcaggactccatctgaaaaaaaaaataaaataaaaataaaaataaataaataaataaataacatagcccctcaaccccactcccacctcaattgccctaccaccatcaatgattgggtttcaattcttcctgtacccataaaaagggtttttgagtttgtatacccattttagagttccatgcgtgtgagaacacattacacctcctgtccaacttaaatattggcttcttacattacactccagttttggtatctgttgtagactcagaccctgactaaggaatggatcagcccagaagatgtctaggatgctaatctttgtggagcgccaaacgttacaagtgtgaccaaatctttctgaaaaggaaaggagactgagaaaattgtaactgctcaaattcctcttcttactctactaataaaagccaatgcttatatgtagtccagtctgtagcaggcattgttagaagtgaataaactttattaacttctttaaatctcacaacttaatgatgtagatatgattattattctcattttacagatgaggaaactgaggcagagagaggttaaaaagtagcacggctaggaagtgccatatctcatatgatgaatactaaagttactatggaaaatacttcaaaaatctctttaagaaatgcccgaaaccactgccccaccaggttatatttgagaattgtaacatgttcatttcatttagctcctcactaaggaggataagcccagagggcagctggggtttttgcttggctgaaggtatgtacattctgtggccagaactgattgttcagggcaaggaaaagagtaagcccagctgcctgctgccaggcccttctctgtccttcccccaggcagctctcaatttcttctccaagtcaatgtgaacaaatgacccaagtatgcacgctggaaagggtagcagtgtattagtctgcttggggtgttaaattattagcctgcatgaaaagcctatatatctttgtcagaagctgctcaggttgaatgtattttcatgaaaataggccctgaaataattcaaaaaaggaaaggagaggtaaaacagcagaaagttcagagcacaagtgatacaggcactagcattacgtcctgatgataggatgggacttgtctctctaagccacgagaactcccactaaaagactgtggaatgggctttgttggcttgtttttgtcctgtgggagagaagctcggctgtggttgtactgccttatgacactggggtgtttgctgaattggtggaacctttttcctcctcaggaaaatctaagttcttcacatcaagattctcaaagaattttacatacatgcagctgaactaggccatcattaggccagaaacataaaaatggagttttatgttaggaagagattgccatgcctgcattaaggaacttgactcaggccaacaaaaatatgctacataaaaagtttatcagcagtctgggcacagtggctcatgcttgttatcccagcactttgggaagctgaaatgggcggaatgcttgaggtcaccaaatttttatggatgcaccataaaaaatgtgtcataattacattatcttcccttcctaatatccacactatccccgtggacccactctgccagcaactactgtttcttcaaatttgtcttgctttttgcataaagaactgttttcttaaagtcctgtttctgtttaagaaactctcatgaatccagatgacgccgaaatataaaccccaatggtatgtatttccaagcttccaacaaatatattgctctgtattctcaactagcttaactttgatccctaactaaaaaatgtttgctggtcccatcaacatatgcatttatgagatcaccaataagatagtatgatttcagggggtctaggaaaggtggtaatccccatatatttctctcattcacttggatgtagcctgctatttcattattagcatttctttcatttgcttaagattttgatcttgtgaagggtgctccctcctaagacataagcatttcaaacttacacttcagtgtgaaggacttttctgaaggcaaataagataggtcaatattcacagaatatgagggtacttgaagtaaaagaagaagctgtcactacatacaggatatttcatgtgtgtgtgtgtgtatgtgtatgtgtgtgtcatcagagatctgaaatacacaaacatggttatcatcttacacaaaaatccaaagatgtttcatttcagtaaattgatttatgttaactaaggatccaggaggcagtctataattcatgttgcacttctagttaagtttagagggaggaatatttggctagagaactgtgatctgttatctgcatggatccagaaatcagacatccaaattttcaagaaccacactacatttcaagccttctgtcacatattcaccccaatacactcatatctgtagaactatatgtccagattgttgatctagactatctgaaaaatgccaatcctactcttaggccaacccttttaggtaggttatctattcagaaagacataccgttttcaaagtttcgcctattggttctggagtcagaaataaactttctctatgagaatatggttcaacagacccatcatcttttccttttttgcattatctcctagagaagaattctacgaattttgcaccatgctagtttcctaaaatccagttcctttttccttgatctttatttaaggtcatgatccagaaaaccttaagaatcatttcgatcatctgatctcttcttcttaattccttgttaatttcactctacctataatttacagtgggtataacatttcacattcacaaatgtacatgtgcaaaaatgtgtttttgcaaaactaaacttaatgtagctttacaaccttatagtatctgtttccacaagatagccaaaaacttataccaattcaaagttattcactcacttccaattaagaactttgtatctttgtgtgccaccagatcaatccaggagtttctctactttgctatccttctccatagaagttaaataagtttccaggtggctgaaatattgtgacttattgtcctgggataaggtgagggctatctggccttcctgttacatcatgtcctctttgaccgttgctaagatgtggcttgtaacacttgatcgtgcacatccatttctggccctgctacatctgctgtggttatctgagacccaagctcagaccccagacaacacttgacatcatgtaagcccaacaagcaaagccagttagccccttctgtgctcttccttcagggctgacgaattcttgccggccttttccaggctacactgaggtgctcacattgatgccctgcctttcaagtatccacttcagctttggttggacttggagcacttctaagaggcctgcagtctcctaaactatcctctgataggccaggtcttctcttctaagacctaaggtttctgacagtgtttacataatccatcctgaacaacagattcattctaagataccaagcagttactcctggcccctgattcttccttcctactctctggatgcacctttgtctcttgggggtgggaacctgctctgggatcattactcaagatatcccccctctacaagtcatgccatagacattctaatatgagccctccatcgttgtcaggatttggagtttaataaaactttttttttttttttttttgtgagacagagtctcactgtgttgcccaggctggaatgtagtggcgccatctcactgcaagctctgcctcccgggttcacaccattctcctgcctcagcctcccgagtagctgggactacaggtgcccaccaccatgcccagctaattttttgtatttttagtagagatggagtttcaccatgttagccaggctggtttcgatgtcctgaccttgtgatttgcccgcctcggcctcccaaaaaacttttttctgtaagaaattccagctcatactgtagcaggacttgcacttatggctcgtatttctgctattttcagcaatgtctgatttgatgttggaaatttagtaataatttatttctttctggcagtttctggtcacccctggggacagtacttatggaagatagttttggttttcttagggacttccagtaagctgaaacttccctctattccttcatattttatttaaagcttgtttccataaaagtcatcacaaaataaaccactttatcatctttgttttttttttctttttgtacaggcattgcttgctacatttattaacttgtcaaggttacttaatctaagggttgtgtccctgtgaaagacaaaatgcacttggtaattaaagagattattttattcagtcaaaccattcattaatgaagagcaagaacacctggggtttagaaaggcaggtaaacaagagggccatgaagaaggataggcagggagacttagaggtttggagaagagtgtggagggcattcttattgtggaatataccaggcagggtgattcttggtggttagccgtttcccagaacaccagtaaaggattaaagttcaacatcgtcagttctcctttttgttcaagaagaatattattctttgttctgtaatctgatgattacttagaaggttaaaaaaaaagccaacaaaaaaaaaaccctttacaaacttttactaaagcagacaaggtaaacacaagctctttttaaaaatcctgtaaataaacccatcaaaccttaactaactttgaccatggtaaataaatttcccctttgtttttttggagaactttgtacatctattcaggttttgtcttgcacaacaacagtcagtcatttcaccttaggacaaaaccattcttttcagcagacaagctgagctcatgaattatacaactcacaactttctgcagccacccattccttatagtacaactttacgaagtggtaaaaatcagcatgttcattaacaggcccaagtatataatctccaagtaacagaaaataagaggcaaaatatagataaacttaagactttgctttgtttcagtactctgtcttactaggaaatgatttaggtattcaataaatatctatcaattaactaactttagtgtaaatctgaggttttaagtggcctaaagatcttggaaattatcttcaagctgacatactataaaacaaaattactattgaaataaggttggtcatgataataatttatttggttaaacacaaatttatactttccataattttaaacattaatcttaaacattagtaatacaagcttaataaatcagtaaacttgtatacatttacacagaacattcccaaatagaaataaaaatctatgtatatattatgcttaaccctgataaatcagagaagacatagctgtttttattaaaaccaaaaatattaaactagtcttgtttgccaaagctttatctaaattatgtgaacttgaattcctaaatcatatccaagttagtttctgtaaaaataatttttaaatcaagacattgaaagtatttgagattcagttttcacttattttttattttttaatttttttcctttttgtggagaacgggatcacactatattgcccaggcaggtctccaactcctgagctcaagctatcgtctcacctcggcctccctaagagctgggattacaggcgtgagccaccgcgcccagctagattcaattttcttaatttctggaaatattaggaatattcaatttatataagtatttacttatctctgaaataacaagaatagagcaccattaagagattttataatctaatgactaatatcatcctgtggtagagaaatgttacacattcacacatgacaggtaaaggcctctctgaattataaatacataaacctgcaggcatagagagagcttacagtttcaattctgaaattttagccatgggtcaagtataaatacataattacaaaactcattggttca

SEQ ID NO: 2 - protein, 192 aa, Homo sapiens
MGKGRAGRVGTTALPPRLKEMKSQESAAGSKLVLRCETSSEYSSLRFKWFKNGNELNRKNKPQNIKIQKKPGKSELRINKASLADSGEYMCKVISKLGNDSASANITIVESNATSTSTTGTSHLVKCAEKEKTFCVNGGECFMVKDLSNPSRYLCKCPNEFTGDRCQNYVMASFYKAEELYQKRVLTITGIC

SEQ ID NO: 3 - protein, 418 aa, Homo sapiens
MRWRRAPRRSGRPGPRAQRPGSAARSSPPLPLLPLLLLLGTAAPGAAAGNEAAPAGASVCSPPSVGSVQELAQRAAVVIEGKVHPQRRQQGALDRKAAAAAGEAGAWGGDREPPAAGPRALGPPAEEPLLAANGTVPSWPTAPVPSAGEPGEEAPYLVKVHQVWAVKAGGLKKDSLLTVRLGTWGHPAFPSCGRLKEDSRYIFFMEPDANSTSRAPAAFRASFPPLETGRNLKKEVSRVLCKRCALPPRLKEMKSQESAAGSKLVLRCETSSEYSSLRFKWFKNGNELNRKNKPQNIKIQKKPGKSELRINKASLADSGEYMCKVISKLGNDSASANITIVESNATSTSTTGTSHLVKCAEKEKTFCVNGGECFMVKDLSNPSRYLCKCPNEFTGDRCQNYVMASFYSTSTPFLSLPE

SEQ ID NO: 4 - protein, 204 aa, Homo sapiens
GRNLKKEVSRVLCKRCALPPRLKEMKSQESAAGSKLVLRCETSSEYSSLRFKWFKNGNELNRKNKPQNIKIQKKPGKSELRINKASLADSGEYMCKVISKLGNDSASANITIVESNATSTSTTGTSHLVKCAEKEKTFCVNGGECFMVKDLSNPSRYLCKCPNEFTGDRCQNYVMASFYKHLGIEFMEAEELYQKRVLTITGIC

SEQ ID NO: 5 - protein, 163 aa, Homo sapiens
GRNLKKEVSRVLCKRCALPPRLKEMKSQESAAGSKLVLRCETSSEYSSLRFKWFKNGNELNRKNKPQNIKIQKKPGKSELRINKASLADSGEYMCKVISKLGNDSASANITIVESNEIITGMPASTEGAYVSSATSTSTTGTSHLVKCAEKEKTFCVNGGECF

SEQ ID NO: 6 - protein, 85 aa, Homo sapiens
FYQLGLHLLSLEHIQSFFLFFFLRRSLALSPRLECSGRISTHCKLRLPDSRHSPASDPGVAGTTGACAISMNRAAIRTKTVLRSS

SEQ ID NO: 7 - protein, 47 aa, Homo sapiens
MWCEMFYGQKMEMRCRNWRLRINLKTKSRFWPDTDAKVTPMLSLLLR

SEQ ID NO: 8 - protein, 19 aa, Homo sapiens
MWCEMFYGQKMEMRCRNWR

SEQ ID NO: 9 - protein, 65 aa, Homo sapiens
YGQKMEMRCRNWRLRINLKTKSRFWPDTDAKVTPMLSLLLRYKLPYFKQLFHLFNSIPFLSLFHM

SEQ ID NO: 10 - protein, 141 aa, Homo sapiens
MKKRNEMIFLATLKNKALPPRLKEMKSQESAAGSKLVLRCETSSEYSSLRFKWFKNGNELNRKNKPQNIKIQKKPGKSELRINKASLADSGEYMCKVISKLGNDSASANITIVESNATSTSTTGTSHLVKCAEKEKTFCVN

SEQ ID NO: 11 - protein, 193 aa, Homo sapiens
MKKRNEMIFLATLKNKALPPRLKEMKSQESAAGSKLVLRCETSSEYSSLRFKWFKNGNELNRKNKPQNIKIQKKPGKSELRINKASLADSGEYMCKVISKLGNDSASANITIVESNEIITGMPASTEGAYVSSESPIRISVSTEGANTSSSTSTSTTGTSHLVKCAEKEKTFCVNGGECFMVKDLSNPSRYLC

SEQ ID NO: 12 - protein, 146 aa, Homo sapiens
MKKRNEMIFLATLKNKALPPRLKEMKSQESAAGSKLVLRCETSSEYSSLRFKWFKNGNELNRKNKPQNIKIQKKPGKSELRINKASLADSGEYMCKVISKLGNDSASANITIVESNEIITGMPASTEGAYVSSATSTSTTGTSHLV

SEQ ID NO: 13 - protein, 637 aa, Homo sapiens
MSKEGRGKGKGKKKERGSGKKPESAAGSQSPALPPRLKEMKSQESAAGSKLVLRCETSSEYSSLRFKWFKNGNELNRKNKPQNIKIQKKPGKSELRINKASLADSGEYMCKVISKLGNDSASANITIVESNEIITGMPASTEGAYVSSESPIRISVSTEGANTSSSTSTSTTGTSHLVKCAEKEKTFCVNGGECFMVKDLSNPSRYLCKCPNEFTGDRCQNYVMASFYKHLGIEFMEAEELYQKRVLTITGICIALLVVGIMCVVAYCKTKKQRKKLHDRLRQSLRSNNTMNIANGPHHPNPPPENVQLVNQYVSKNVISSEHIVEREAETSFSTSHYTSTAHHSTTVTQTPSHSWSNGHTESILSESHSVIVMSSVENSRHSSPTGGPRGRLNGTGGPRECNSFLRHARETPDSYRDSPHSYVSAMTTPARMSPVDFHTPSSPKSPPSEMSPPVSSMTVSMPSMAVSPFMEEERPLLLVTPPRLREKKFDHHPQQFSSFHHNPAHDSNSLPDLRIVEDEEYETTQEYEPAQEPVKKLANSRRAKRTKPNGHIANRLEVDSNTSSQSSNSESETEDERVGEDTPFLGIQNPLAASLEATPAFRLADSRTNPAGRFSTQEEIQARLSSVIANQDPIAV

SEQ ID NO: 14 - protein, 629 aa, Homo sapiens
MSKEGRGKGKGKKKERGSGKKPESAAGSQSPALPPRLKEMKSQESAAGSKLVLRCETSSEYSSLRFKWFKNGNELNRKNKPQNIKIQKKPGKSELRINKASLADSGEYMCKVISKLGNDSASANITIVESNEIITGMPASTEGAYVSSESPIRISVSTEGANTSSSTSTSTTGTSHLVKCAEKEKTFCVNGGECFMVKDLSNPSRYLCKCPNEFTGDRCQNYVMASFYKAEELYQKRVLTITGICIALLVVGIMCVVAYCKTKKQRKKLHDRLRQSLRSNNTMNIANGPHHPNPPPENVQLVNQYVSKNVISSEHIVEREAETSFSTSHYTSTAHHSTTVTQTPSHSWSNGHTESILSESHSVIVMSSVENSRHSSPTGGPRGRLNGTGGPRECNSFLRHARETPDSYRDSPHSYVSAMTTPARMSPVDFHTPSSPKSPPSEMSPPVSSMTVSMPSMAVSPFMEEERPLLLVTPPRLREKKFDHHPQQFSSFHHNPAHDSNSLPDLRIVEDEEYETTQEYEPAQEPVKKLANSRRAKRTKPNGHIANRLEVDSNTSSQSSNSESETEDERVGEDTPFLGIQNPLAASLEATPAFRLADSRTNPAGRFSTQEEIQARLSSVIANQDPIAV

SEQ ID NO: 15 - protein, 209 aa, Homo sapiens
MSKEGRGKGKGKKKERGSGKKPESAAGSQSPALPPRLKEMKSQESAAGSKLVLRCETSSEYSSLRFKWFKNGNELNRKNKPQNIKIQKKPGKSELRINKASLADSGEYMCKVISKLGNDSASANITIVESNEIITGMPASTEGAYVSSESPIRISVSTEGANTSSSTSTSTTGTSHLVKCAEKEKTFCVNGGECFMVKDLSNPSRYLCK

SEQ ID NO: 16 - protein, 632 aa, Homo sapiens
MSKEGRGKGKGKKKERGSGKKPESAAGSQSPALPPRLKEMKSQESAAGSKLVLRCETSSEYSSLRFKWFKNGNELNRKNKPQNIKIQKKPGKSELRINKASLADSGEYMCKVISKLGNDSASANITIVESNEIITGMPASTEGAYVSSESPIRISVSTEGANTSSSTSTSTTGTSHLVKCAEKEKTFCVNGGECFMVKDLSNPSRYLCKCQPGFTGARCTENVPMKVQNQEKAEELYQKRVLTITGICIALLVVGIMCVVAYCKTKKQRKKLHDRLRQSLRSNNTMNIANGPHHPNPPPENVQLVNQYVSKNVISSEHIVEREAETSFSTSHYTSTAHHSTTVTQTPSHSWSNGHTESILSESHSVIVMSSVENSRHSSPTGGPRGRLNGTGGPRECNSFLRHARETPDSYRDSPHSYVSAMTTPARMSPVDFHTPSSPKSPPSEMSPPVSSMTVSMPSMAVSPFMEEERPLLLVTPPRLREKKFDHHPQQFSSFHHNPAHDSNSLPDLRIVEDEEYETTQEYEPAQEPVKKLANSRRAKRTKPNGHIANRLEVDSNTSSQSSNSESETEDERVGEDTPFLGIQNPLAASLEATPAFRLADSRTNPAGRFSTQEEIQARLSSVIANQDPIAV

SEQ ID NO: 17 - protein, 456 aa, Homo sapiens
MSKEGRGKGKGKKKERGSGKKPESAAGSQSPALPPRLKEMKSQESAAGSKLVLRCETSSEYSSLRFKWFKNGNELNRKNKPQNIKIQKKPGKSELRINKASLADSGEYMCKVISKLGNDSASANITIVESNEIITGMPASTEGAYVSSESPIRISVSTEGANTSSSTSTSTTGTSHLVKCAEKEKTFCVNGGECFMVKDLSNPSRYLCKCQPGFTGARCTENVPMKVQNQEKAEELYQKRVLTITGICIALLVVGIMCVVAYCKTKKQRKKLHDRLRQSLRSNNTMNIANGPHHPNPPPENVQLVNQYVSKNVISSEHIVEREAETSFSTSHYTSTAHHSTTVTQTPSHSWSNGHTESILSESHSVIVMSSVENSRHSSPTGGPRGRLNGTGGPRECNSFLRHARETPDSYRDSPHSHNLIAELRRNKAHRSKCMQIQLSATHLRSSSIPHLGFIL

SEQ ID NO: 18 - protein, 239 aa, Homo sapiens
MSKEGRGKGKGKKKERGSGKKPESAAGSQSPALPPRLKEMKSQESAAGSKLVLRCETSSEYSSLRFKWFKNGNELNRKNKPQNIKIQKKPGKSELRINKASLADSGEYMCKVISKLGNDSASANITIVESNEIITGMPASTEGAYVSSESPIRISVSTEGANTSSSTSTSTTGTSHLVKCAEKEKTFCVNGGECFMVKDLSNPSRYLCKCPNEFTGDRCQNYVMASFYSTSTPFLSLPE

SEQ ID NO: 19 - protein, 156 aa, Homo sapiens
RGKGKGKKKERGSGKKPESAAGSQSPALPPRLKEMKSQESAAGSKLVLRCETSSEYSSLRFKWFKNGNELNRKNKPQNIKIQKKPGKSELRINKASLADSGEYMCKVISKLGNDSASANITIVESNATSTSTTGTSHLVKCAEKEKTFCVNGGECF

SEQ ID NO: 20 - protein, 171 aa, Homo sapiens
KGKGKKKERGSGKKPESAAGSQSPALPPRLKEMKSQESAAGSKLVLRCETSSEYSSLRFKWFKNGNELNRKNKPQNIKIQKKPGKSELRINKASLADSGEYMCKVISKLGNDSASANITIVESNEIITGMPASTEGAYVSSATSTSTTGTSHLVKCAEKEKTFCVNGGECF

SEQ ID NO: 21 - protein, 198 aa, Homo sapiens
MFLFERLPGDQSCFSFSFLLLALPPRLKEMKSQESAAGSKLVLRCETSSEYSSLRFKWFKNGNELNRKNKPQNIKIQKKPGKSELRINKASLADSGEYMCKVISKLGNDSASANITIVESNEIITGMPASTEGAYVSSESPIRISVSTEGANTSSSTSTSTTGTSHLVKCAEKEKTFCVNGGECFMVKDLSNPSRYLC

SEQ ID NO: 22 - protein, 164 aa, Homo sapiens
MFLFERLPGDQSCFSFSFLLLALPPRLKEMKSQESAAGSKLVLRCETSSEYSSLRFKWFKNGNELNRKNKPQNIKIQKKPGKSELRINKASLADSGEYMCKVISKLGNDSASANITIVESNATSTSTTGTSHLVKCAEKEKTFCVNGGECFMVKDLSNPSRYLC

SEQ ID NO: 23 - protein, 122 aa, Homo sapiens
MKSQESAAGSKLVLRCETSSEYSSLRFKWFKNGNELNRKNKPQNIKIQKKPGKSELRINKASLADSGEYMCKVISKLGNDSASANITIVESNATSTSTTGTSHLVKCAEKEKTFCVNGGECF

SEQ ID NO: 24 - protein, 175 aa, Homo sapiens
GSKLVLRCETSSEYSSLRFKWFKNGNELNRKNKPQNIKIQKKPGKSELRINKASLADSGEYMCKVISKLGNDSASANITIVESNEIITGMPASTEGAYVSSATSTSTTGTSHLVKCAEKEKTFCVNGGECFMVKDLSNPSRYLCKCPNEFTGDRCQNYVMASFYSTSTPFLSLPE

SEQ ID NO: 25 - protein, 128 aa, Homo sapiens
GSKLVLRCETSSEYSSLRFKWFKNGNELNRKNKPQNIKIQKKPGKSELRINKASLADSGEYMCKVISKLGNDSASANITIVESNATSTSTTGTSHLVKCAEKEKTFCVNGGECFMVKDLSNPSRYLCK

SEQ ID NO: 26 - protein, 192 aa, Homo sapiens
GSKLVLRCETSSEYSSLRFKWFKNGNELNRKNKPQNIKIQKKPGKSELRINKASLADSGEYMCKVISKLGNDSASANITIVESNEIITGMPASTEGAYVSSESPIRISVSTEGANTSSSTSTSTTGTSHLVKCAEKEKTFCVNGGECFMVKDLSNPSRYLCKCPNEFTGDRCQNYVMASFYSTSTPFLSLPE

SEQ ID NO: 27 - protein, 157 aa, Homo sapiens
SKLVLRCETSSEYSSLRFKWFKNGNELNRKNKPQNIKIQKKPGKSELRINKASLADSGEYMCKVISKLGNDSASANITIVESNATSTSTTGTSHLVKCAEKEKTFCVNGGECFMVKDLSNPSRYLCKCPNEFTGDRCQNYVMASFYSTSTPFLSLPE

SEQ ID NO: 28 - protein, 252 aa, Homo sapiens
RCETSSEYSSLRFKWFKNGNELNRKNKPQNIKIQKKPGKSELRINKASLADSGEYMCKVISKLGNDSASANITIVESNEIITGMPASTEGAYVSSESPIRISVSTEGANTSSSTSTSTTGTSHLVKCAEKEKTFCVNGGECFMVKDLSNPSRYLCKCPNEFTGDRCQNYVMASFYKHLGIEFMEAEELYQKRVLTITGICIALLVVGIMCVVAYCKTKKQRKKLHDRLRQSLRSNNTMNIANGPHHPNPPPE

SEQ ID NO: 29 - protein, 548 aa, Homo sapiens
KSELRINKASLADSGEYMCKVISKLGNDSASANITIVESNEIITGMPASTEGAYVSSESPIRISVSTEGANTSSSTSTSTTGTSHLVKCAEKEKTFCVNGGECFMVKDLSNPSRYLCKCPNEFTGDRCQNYVMASFYKHLGIEFMEAEELYQKRVLTITGICIALLVVGIMCVVAYCKTKKQRKKLHDRLRQSLRSNNTMNIANGPHHPNPPPENVQLVNQYVSKNVISSEHIVEREAETSFSTSHYTSTAHHSTTVTQTPSHSWSNGHTESILSESHSVIVMSSVENSRHSSPTGGPRGRLNGTGGPRECNSFLRHARETPDSYRDSPHSERYVSAMTTPARMSPVDFHTPSSPKSPPSEMSPPVSSMTVSMPSMAVSPFMEEERPLLLVTPPRLREKKFDHHPQQFSSFHHNPAHDSNSLPDLRIVEDEEYETTQEYEPAQEPVKKLANSRRAKRTKPNGHIANRLEVDSNTSSQSSNSESETEDERVGEDTPFLGIQNPLAASLEATPAFRLADSRTNPAGRFSTQEEIQARLSSVIANQDPIAV

SEQ ID NO: 30 - protein, 125 aa, Homo sapiens
ASANITIVESNEIITGMPASTEGAYVSSESPIRISVSTEGANTSSSTSTSTTGTSHLVKCAEKEKTFCVNGGECFMVKDLSNPSRYLCKCQPGFTGARCTENVPMKVQNQESAQMSLLVIAAKTT

SEQ ID NO: 31 - protein, 296 aa, Homo sapiens
MEIYSPDMSEVAAERSSSPSTQLSADPSLDGLPAAEDMPEPQTEDGRTPGLVGLAVPCCACLEAERLRGCLNSEKICIVPILACLVSLCLCIAGLKWVFVDKIFEYDSPTHLDPGGLGQDPIISLDATAASAVWVSSEAYTSPVSRAQSESEVQVTVQGDKAVVSFEPSAAPTPKNRIFAFSFLPSTAPSFPSPTRNPEVRTPKSATQPQTTETNLQTAPKLSTSTSTTGTSHLVKCAEKEKTFCVNGGECFMVKDLSNPSRYLCKCPNEFTGDRCQNYVMASFYSTSTPFLSLPE

SEQ ID NO: 32 - protein, 196 aa, Homo sapiens
GGLGQDPIISLDATAASAVWVSSEAYTSPVSRAQSESEVQVTVQGDKAVVSFEPSAAPTPKNRIFAFSFLPSTAPSFPSPTRNPEVRTPKSATQPQTTETNLQTAPKLSTSTSTTGTSHLVKCAEKEKTFCVNGGECFMVKDLSNPSRYLCKCPNEFTGDRCQNYVMASFYKHLGIEFMEAEELYQKRVLTITGIC

SEQ ID NO: 33 - protein, 129 aa, Homo sapiens
PKNRIFAFSFLPSTAPSFPSPTRNPEVRTPKSATQPQTTETNLQTAPKLSTSTSTTGTSHLVKCAEKEKTFCVNGGECFMVKDLSNPSRYLCKCPNEFTGDRCQNYVMASFYKAEELYQKRVLTITGIC

SEQ ID NO: 34 - protein, 119 aa, Homo sapiens
RTPKSATQPQTTETNLQTAPKLSTSTSTTGTSHLVKCAEKEKTFCVNGGECFMVKDLSNPSRYLCKCPNEFTGDRCQNYVMASFYKAEELYQKRVLTITGICIALLVVGIMCVVAYCKT

SEQ ID NO: 35 - protein, 99 aa, Homo sapiens
DFKEQESMQIPKHIEDITATSTSTTGTSHLVKCAEKEKTFCVNGGECFMVKDLSNPSRYLCKCQPGFTGARCTENVPMKVQNQEKAEELYQKRVLTITG

SEQ ID NO: 36 - protein, 99 aa, Homo sapiens
MQIPKHIEDITATSTSTTGTSHLVKCAEKEKTFCVNGGECFMVKDLSNPSRYLCKCPNEFTGDRCQNYVMASFYKHLGIEFMEAEELYQKRVLTITGIC

SEQ ID NO: 37 - protein, 25 aa, Homo sapiens
MQIPKHIEDITGAQMSLLVIAAKTT

SEQ ID NO: 38 - protein, 344 aa, Homo sapiens
GECFMVKDLSNPSRYLCKCQPGFTGARCTENVPMKVQNQEKHLGIEFMEAEELYQKRVLTITGICIALLVVGIMCVVAYCKTKKQRKKLHDRLRQSLRSNNTMNIANGPHHPNPPPENVQLVNQYVSKNVISSEHIVEREAETSFSTSHYTSTAHHSTTVTQTPSHSWSNGHTESILSESHSVIVMSSVENSRHSSPTGGPRGRLNGTGGPRECNSFLRHARETPDSYRDSPHSYVSAMTTPARMSPVDFHTPSSPKSPPSEMSPPVSSMTVSMPSMAVSPFMEEERPLLLVTPPRLREKKFDHHPQQFSSFHHNPAHDSNSLPDLRIVEDEEYETTQEYEPAQ

SEQ ID NO: 39 - protein, 161 aa, Homo sapiens
MCVVAYCKTKKQRKKLHDRLRQSLRSNNTMNIANGPHHPNPPPENVQLVNQYVSKNVISSEHIVEREAETSFSTSHYTSTAHHSTTVTQTPSHSWSNGHTESILSESHSVIVMSSVENSRHSSPTGGPRGRLNGTGGPRECNSFLRHARETPDSYRDSPHS

SEQ ID NO: 40 - DNA, 24 bp, Homo sapiens
cagttctggaaacttttctgtgtg

SEQ ID NO: 41 - DNA, 25 bp, Homo sapiens
cagatccacaagttctacaatagca

SEQ ID NO: 42 - DNA, 26 bp, Homo sapiens
ttttctttactggtgctctctagtgt

SEQ ID NO: 43 - DNA, 20 bp, Homo sapiens
tgcaggcatagaattctcca

SEQ ID NO: 44 - DNA, 26 bp, Homo sapiens
gagtagttgggactacagatgcacac

SEQ ID NO: 45 - DNA, 21 bp, Homo sapiens
cagcttgggcaacaaagtaag

SEQ ID NO: 46 - DNA, 20 bp, Homo sapiens
ctcaaattttgggggctcac

SEQ ID NO: 47 - DNA, 26 bp, Homo sapiens
caatattatacaatttctggcagcat

SEQ ID NO: 48 - DNA, 20 bp, Homo sapiens
atactgaagggcaggggttt

SEQ ID NO: 49 - DNA, 23 bp, Homo sapiens
attttctgggtgatttcctcatt

SEQ ID NO: 50 - DNA, 20 bp, Homo sapiens
aggcttctggaccctcaaat

SEQ ID NO: 51 - DNA, 20 bp, Homo sapiens
ctcagctttgccctctgaat

SEQ ID NO: 52 - DNA, 20 bp, Homo sapiens
agggcaggaacctttcatct

SEQ ID NO: 53 - DNA, 20 bp, Homo sapiens
tagcgagaaagttggggaga

SEQ ID NO: 54 - DNA, 20 bp, Homo sapiens
agtgagtagggctggctgct

SEQ ID NO: 55 - DNA, 20 bp, Homo sapiens
gctgctaatatggccccttc

SEQ ID NO: 56 - DNA, 21 bp, Homo sapiens
ccacatgtccaactgaagagg

SEQ ID NO: 57 - DNA, 27 bp, Homo sapiens
tctccatgtgtaaaacaatacatatca

SEQ ID NO: 58 - DNA, 27 bp, Homo sapiens
cttttaatcatgaaagaatagcaaaaa

SEQ ID NO: 59 - DNA, 27 bp, Homo sapiens
tgttgttgtatatttcagaatttcctt

SEQ ID NO: 60 - DNA, 19 bp, Homo sapiens
ggcatgtcccaatttggtt

SEQ ID NO: 61 - DNA, 20 bp, Homo sapiens
tgtcccagctgatctaagca

SEQ ID NO: 62 - DNA, 23 bp, Homo sapiens
gagttttgaggatcctagagcaa

SEQ ID NO: 63 - DNA, 24 bp, Homo sapiens
gaagggctaaaaggagaattcata

SEQ ID NO: 64 - DNA, 23 bp, Homo sapiens
tttgcttatggtgtcattctttc

SEQ ID NO: 65 - DNA, 22 bp, Homo sapiens
ggagttcctgggttctaatctc

SEQ ID NO: 66 - DNA, 20 bp, Homo sapiens
ccacagcatgcaaaatgaac

SEQ ID NO: 67 - DNA, 20 bp, Homo sapiens
tgtaggatgccaaggaggtt

SEQ ID NO: 68 - DNA, 20 bp, Homo sapiens
ggcagcaatacaaacacagc

SEQ ID NO: 69 - DNA, 20 bp, Homo sapiens
ctagggtcaatgggtgagga

SEQ ID NO: 70 - DNA, 20 bp, Homo sapiens
tttgggatgtttcagccatt

SEQ ID NO: 71 - DNA, 20 bp, Homo sapiens
tggaaggctccatgaaagtg

SEQ ID NO: 72 - DNA, 20 bp, Homo sapiens
agaagcaaggatccccagtt

SEQ ID NO: 73 - DNA, 24 bp, Homo sapiens
gcaaacataaagtatgaccccttg

SEQ ID NO: 74 - DNA, 20 bp, Homo sapiens
acattgcctccaaccaagtc

SEQ ID NO: 75 - DNA, 20 bp, Homo sapiens
caggtatgagccacctctcc

SEQ ID NO: 76 - DNA, 20 bp, Homo sapiens
tgcagcagtagtgaccctgt

SEQ ID NO: 77 - DNA, 21 bp, Homo sapiens
atcaccctgacactgaggaga

SEQ ID NO: 78 - DNA, 20 bp, Homo sapiens
ggcctggaaaaagtgtgtgt

SEQ ID NO: 79 - DNA, 20 bp, Homo sapiens
gcccgtgaatctcttgtgtt

SEQ ID NO: 80 - DNA, 20 bp, Homo sapiens
gcaacttcatgcctgtagca

SEQ ID NO: 81 - DNA, 20 bp, Homo sapiens
caccctgtgaaaatggctct

SEQ ID NO: 82 - DNA, 20 bp, Homo sapiens
ggttcttcgaaatggcaagt

SEQ ID NO: 83 - DNA, 19 bp, Homo sapiens
ggcgagcagagtgagacac

SEQ ID NO: 84 - DNA, 21 bp, Homo sapiens
tctgtgacgcaattcaatgat

SEQ ID NO: 85 - DNA, 21 bp, Homo sapiens
accagcctggctttaaaacat

SEQ ID NO: 86 - DNA, 20 bp, Homo sapiens
gcaaagcttctccacactcc

SEQ ID NO: 87 - DNA, 20 bp, Homo sapiens
aacctggaggttcaagtgga

SEQ ID NO: 88 - DNA, 20 bp, Homo sapiens
tgtcactatggcccactgaa

SEQ ID NO: 89 - DNA, 20 bp, Homo sapiens
gaaaagcatggcagatttga

SEQ ID NO: 90 - DNA, 20 bp, Homo sapiens
cccagaaagcaggcaagtag

SEQ ID NO: 91 - DNA, 20 bp, Homo sapiens
catgaaaaagacgcaagcaa

SEQ ID NO: 92 - DNA, 20 bp, Homo sapiens
cccttagaagaggccaggtt

SEQ ID NO: 93 - DNA, 18 bp, Homo sapiens
aggttgcgctctcctgct

SEQ ID NO: 94 - DNA, 20 bp, Homo sapiens
ttagccaagcacagtggtgt

SEQ ID NO: 95 - DNA, 19 bp, Homo sapiens
ttggttccctgacccctaa

SEQ ID NO: 96 - DNA, 20 bp, Homo sapiens
acaggaagactgccatttgc

SEQ ID NO: 97 - DNA, 21 bp, Homo sapiens
aagcctttgctcatgttctca

SEQ ID NO: 98 - DNA, 20 bp, Homo sapiens
aaatttcatgatgcggaagg

SEQ ID NO: 99 - DNA, 20 bp, Homo sapiens
acgctttttgaccacacaca

SEQ ID NO: 100 - DNA, 20 bp, Homo sapiens
cccatggaactaccacacaa

SEQ ID NO: 101 - DNA, 20 bp, Homo sapiens
agggcctttccttcaaaatg

SEQ ID NO: 102 - DNA, 20 bp, Homo sapiens
aagcagcaggcaaaatgagt

SEQ ID NO: 103 - DNA, 20 bp, Homo sapiens
gatgcaaaggcaagtccagt

SEQ ID NO: 104 - DNA, 1006 bp, Homo sapiens
cggtttttttgccttttctattttgccttttttttttttgcccttatacctcttcgcctttctgtggttccatccacttcttccccctcctcctcccataaacaactctcctacccctgcacccccaataaataaataaaaggaggagggcaaggggggaggaggaggagtggtgctgcgaggggaaggaaaagggaggcagcgcgagagagccgggcagagtccgaaccgacagccagaagcccgcacgcacctcgcaccatgagatggcgacgcgccccgcgccgctccgggcgtcccggcccccgggcccagcgccccggctccgccgcccgctcgtcgccgccgctgccgctgctgccactactgctgctgctggggaccgcggccctggcgccgggggcggcggccggcaacgaggcggctcccgcgrgggcctcggtgtgctactygtccccgcccagcgtgggatcggtgcaggagctagctcagcgcgccgcggtggtgatcgagggaaaggtgcacccgcagcggcggcagcagggggcactcgacaggaaggcggcggcggcggcgggcgaggcaggggcgtggggcggcgatcgcgagccgccagccgcgggcccacgggcgctggggccgcccgccgaggagccgctgctcgccgccaacgggaccgtgccctcttggcccaccgccccggtgcccagcgccggcgagcccggggaggaggcgccctatctggtgaaggtgcaccaggtgtgggcggtgaaagccgggggcttgaagaaggactcgctgctcaccgtgcgcctggggacctggggccaccccgccttcccctcctgcgggaggctcaaggaggacagcaggtacatcttcttcatggagcccgacgccaacagcaccagccgcgcgccggccgccttccgagcctctttcccccctctggagacgggccggaacctcaagaaggaggtcagccgggtgctgtgcaagcggtgcg

SEQ ID NO: 105 - DNA, 592 bp, Homo sapiens
gcgcctgcctccaacctgcgggcgggaggtgggtggctgcggggcaattgaaaaagagccggcgaggagttccccgaaacttgttggaactccgggctcgcgcggaggccaggagctgagcggcggcggctgccggacgatgggagcgtgagcaggacggtgataacctctccccgatcgggttgcgagggcgccgggcagaggccaggacgcgagccgccagcggygggacccatcgacgacttcccggggcgacaggagcagccccgagagccagggcgagcgcccgttccaggtggccggaccgcccgccgcgtccgcgccgcgctccctgcaggcaacgggagacgcccccgcgcagcgcgagcgcctcagcgcggccgctcgctctccccmtcgagggacaaacttttcccaaacccgatccgagcccttggaccaaactcgcctgcgccgagagccgtccgcgtagagcgctccgtctccggcgagatgtccgagcgcaaagaaggcagaggcaaagggaagggcaagaagaaggagcgaggctccggcaagaagccggagtccgcggcgggcagccagagcccag

SEQ ID NO: 106 - DNA, 178 bp, Homo sapiens
ccttgcctccccrattgaaagagatgaaaagccaggaatcggctgcaggttccaaactagtccttcggtgtgaaaccagttctgaatactcctctctcagattcaagtggttcaagaatgggaatgaattgaatcgaaaaaacaaaccacaaaatatcaagatacaaaaaaagccagg

SEQ ID NO: 107 - DNA, 51 bp, Homo sapiens
agatcatcactggyatgccagcctcaactgaaggagcatatgtgtcttcag

SEQ ID NO: 108 - DNA, 1160 bp, Homo sapiens
gcctctcctgccgccgctgctgctgccgccgccgccaccgccgctggtcctccttctgcttttacttctcctgcatgacagttgttttcttcatctgagcagacaccagcttcagatgctcgaggtgagaaacatgcctttcagtttgggctactggtttacttaattaatcagccggcagctccgtcgatctattttcgtccctgtcctcttgacgagcccgggatggtttggagtagcatttaaaagaactagaaaagtggcccagaaacagcagcttaaagaattattacgatatactttgattttgtagttgctaggagcttttcttccccccttgcatctttctgaactcttcttgattttaataatggccttggacttggacgatttatcgatttccccctgtaagatgctgtatcatttggttgggggggcctctgcgtggtaatggaccgtgagagcggccaggccttcttctggaggtgagccgatggagatttattccccagacatgtctgaggtcgccgccgagaggtcctccagcccctccactcagctgagtgcagacccatctcttgatgggcttccggcagcagaagacatgccagagccccagactgaagatgggagaacccctggactcgtgggcctggccgtgccctgctgtgcgtgcctagaagctgagcgcctgagaggttgcctcaactcagagaaaatctgcattgtccccatcctggcttgcctggtcagcctctgcctctgcatcgccggcctcaagtgggtatttgtggacaagatctttgaatatgactctcctactcaccttgaccctggggggttaggccaggaccctattatttctctggacgcaactgctgcctcagctstgtgggtgtcgtctgaggcatacacttcacctgtctctagggctcaatctgaaagtgaggttcaagttacagtgcaaggtgacaaggctgttgtctcctttgaaccatcagcggcaccgacaccgaagaatcgtatttttgccttttctttcttgccgtccactgcgccatccttcccttcacccacccggaaccctgaggtgagaacgcccaagtcagcaactcagccacaaacaacagaaactaatctccaaactgctcctaaacttt

SEQ ID NO: 109 - DNA, 675 bp, Homo sapiens
ctacatctacatccaccactgggacaagccatcttgtaaaatgtgcggagaaggagaaaactttctgtgtgaatggaggggagtgcttcatggtgaaagacctttcaaacccctcgagatacttgtgcaagtaagaaaagaaatcctgtgtgtcgcttatgtctataactccttgtttcagatgattctatgtctcatgatgtattgttgctttttttccaattttgttgcatcatgttgaataatgctgttttatatgtagagtgttttaaaacattcacaccattcgtcatcactcctctgtcatatgcagaattgttttttgctcttttcaatgtgtgtgaggtgttttttgtttttgtttttgttttttgccatgttatttatagtgttgctttccttgtggtttttcttgttgttattcagaaaagatgtgcagatatcacagaggcctataacttttggtatctacttctacatccaatgtatgaattaagctgtaagataatgttgctttcttatcccrgtgatcacctgccaaatgaataagacaacaaagagaagcagaagggcagaagattatttactgacatatatctattacacttgggattgtctyactgttgcataactattttttaaacggagtttagttttatattgctagtaaaaaaa

SEQ ID NO: 110 - DNA, 103 bp, Homo sapiens
aggcggaggagctgtaccagaagagagtgctgaccataaccggcatctgcatcgccctccttgtggtcggcatcatgtgtktggtggcctactgcaaaaccaa

SEQ ID NO: 111 - DNA, 127 bp, Homo sapiens
gaaacagcggaaaaagctgcatgaccgtcttcggcagagccttcggtctgaacgaaacaataygatgaacattgccaatgggcctcaccatcctaacccaccccccgagaatgtccagctggtgaat

SEQ ID NO: 112 - DNA, 846 bp, Homo sapiens
gtatgtgtcagccatgaccaccccggctcgtatgtcacctgtagatttccacacgccaagctcccccaaatcgcccccttcggaaatgtctccaccygtgtccagcatgacggtgtccatgccttccatggcggtcagccccttcatggaagaagagagacctctacttctcgtgacaccaccaaggctgcgggagaagaagtttgaccatcaccctcagcagttcagctccttccaccacaaccccgcgcatgacagtaacagcctccctgctagccccttgaggatagtggaggatgaggagtatgaaacgacccaagagtacgagccagcccaagagcctgttaagaaactcgccaatagcyrgcgggccaaaagaaccaagcccaatggccacattgctaacagattggaagtggacagcaacacaagctcccagagcagtaactcagagagtgaaacagaagatgaaagagtaggtgaagatacgcctttcctgggcatacagaaccccctggcagccagtcttgaggcaacacctgccttccgcctggctgacagcaggactaacccagcaggccgcttctcgacacaggaagaaatccaggccaggctgtctagtgtaattgctaaccaagaccctattgctgtataaaacctaaataaacacatagattcacctgtaaaactttattttatataataaagtattccaccttaaattaaacaatttattttattttagcagttctgcaaatagaaaacaggaaaaaaacttttataaattaaatatatgtatgtaaaaatgtgttatgtgccatatgtagcaattttttacagtatttc

SEQ ID NO: 113 - DNA, 558 bp, Homo sapiens
aatcgggcagccattagaaccaaaacagttctgaggagctcccaggctgcaatgtggtgcgaaatgttttatggacagaaaatggaaatgaggtgcagaaattggaggtgagattcagagatagctgattggttacagctcagcctttgccttgtttgaacatggtttgaacagttgattgactgaagctaggctgctgtgattggctgatactttactatttgttacaaaggcaaattcctaatttaagctttcaaattgtttaartactaagttaggttttactttgttacttaggactcatatcgaggtttctaaagcccacatctgatacgatttaacattacctatgtgaagaattactaagcagaaacattttgaaagcctcatgacctgaatcgtattaaatacttaacaattgaatttgtctcaataataattatgtttaaaattatgaatgctggtttgtaaaaaaaaaagccacaaattttaaaattctgatataatctaatatctggtattcagctttgtattatcattttaaaatttaatgaacat

SEQ ID NO: 114 - DNA, 178 bp, Homo sapiens
gctaagaataaacttgaagacaaagagtagattttggccagacactgatgctaaagtcaccccgatgctgtctttgcttctaaggtataaattaccttattttwagcaactttttcaccttttcaactctatccctttcctcagcctctttcatatgtgaaataaaatattcacttac

SEQ ID NO: 115 - DNA, 262 bp, Homo sapiens
atgaaatttcagtctttattcaagrtcaagtgcaactgtctctttgaggaaagtcctttgaccgccatttctccccttcagaaggcaaacacctgggggagaagatctgcttaaggacctggtaactgacaaagaatggaatgggagcgagaaccgcctagccatcccttctccttgcacagtcatgaaacaaaagttgaaaaggagcctggttttacttgaccagtcataaattaccataaaataaaatgagatattagga

SEQ ID NO: 116 - DNA, 260 bp, Homo sapiens
caagcactttataccactttttataaaataagccctcactttcattacattatttaactygtatttctgccttgtgttatagatagaaagtatattattatttctactttatagctgaagaaactgagtccaaaatgggtagagcaactggcactaaagatcacctagccagtccgagwtcacacagtcagtattaggactggggccttgtgccttccagtgcagggtcccttacaccagtcatgacatagatgcccaga

SEQ ID NO: 117 - DNA, 379 bp, Homo sapiens
caagcactttataccactttttataaaataagccctcactttcattacattatttaactygtatttctgccttgtgttatagatagaaagtatattattatttctactttatagctgaagaaactgagtccaaaatgggtagagcaactggcactaaagatcacctagccagtccgagwtcacacagtcagtattaggactggggccttgtgccttccagtgcagggtcccttacaccagtcatgacatagatgcccagatcatgcatgacttgatgtaaaaacaacaatttttgttgtcccagtttgagtccttataaatttcccctgtcaaagaaataaacatgcaactctcagaaattatcttttatggagctttt

SEQ ID NO: 118 - DNA, 401 bp, Homo sapiens
ggactggggccttgtgccttccagtgcagggtcccttacaccagtcatgacatagatgcccagatcatgcatgacttgatgtaaaaacaacaatttttgttgtcccagtttgagtccttataaatttcccctgtcaaagaaataaacatgcaactctcagaaattatcttttatggagcttttaaaggccactttgccaargggagctatatarccatgacataaacatgaagatggattgacagaaaatactctttcacaggctggaggaaatattgggggaaagaaattttctcagactgcccttccaacgtggcatggatcatggaggtcagcttttctagcttgtgcccagaggtctgtctacctcagctgtgtcttgtgattgataggaggataca

SEQ ID NO: 119 - DNA, 401 bp, Homo sapiens
gtgccttccagtgcagggtcccttacaccagtcatgacatagatgcccagatcatgcatgacttgatgtaaaaacaacaatttttgttgtcccagtttgagtccttataaatttcccctgtcaaagaaataaacatgcaactctcagaaattatcttttatggagcttttaaaggccactttgccaargggagctatatarccatgacataaacatgaagatggattgacagaaaatactctttcacaggctggaggaaatattgggggaaagaaattttctcagactgcccttccaacgtggcatggatcatggaggtcagcttttctagcttgtgcccagaggtctgtctacctcagctgtgtcttgtgattgataggaggatacagtctcccagggtg

SEQ ID NO: 120 - DNA, 401 bp, Homo sapiens
tcacaggctggaggaaatattgggggaaagaaattttctcagactgcccttccaacgtggcatggatcatggaggtcagcttttctagcttgtgcccagaggtctgtctacctcagctgtgtcttgtgattgataggaggatacagtctcccagggtgtgatttaaggtggagcttataggtctacaaagctcaagctctwatcaagctactatggcatgatagtacaattataaagaaagtagactagtttctataagctgtgtataaaaccaggcccaccctaacatttgcagggcctaggccaagagtgtatgtagagtctcatataccgtatgtctaaatatttcaaagttataaaccaagaagggcctgtggcccaaactgtgttcccaccctaag

SEQ ID NO: 121 - DNA, 401 bp, Homo sapiens
gtggggccctctaaagcagagggtcctggaggagtctcttcagtccaatggctgaattactccaagactctttcatacaaaagttagctgggcatggtggcatgcgcctgtagtcccagctacttgggagactgaggcgggagaatcacttgaacctgggaggcggaggttgcagtgagccaagattgtgtcattgccctytagcctgggtgacagagcaagactccatctcaaaaaacaaaacaaaacaaaacaaaaaaaactctttctttactttataaccatatggcaggacatctcagttcatctatgacctgtggttttaaagtaaattctgtttaaagttatctttaaaatagctttatttttgttaaaatagagccatatcttcatctgcggga

SEQ ID NO: 122 - DNA, 401 bp, Homo sapiens
ggcaggacatctcagttcatctatgacctgtggttttaaagtaaattctgtttaaagttatctttaaaatagctttatttttgttaaaatagagccatatcttcatctgcgggaaatcatattgactccatgataagctatattctggaaaatagtcagtgtgctgacgattgctacctgtgagtagctcacccaacccayaggcaaagtagcaaagagagaggcatggcaacccccaacgtgagaggcttgtagacaacccacagttctagcagatgtcagtgcaacggggcaaatttcatccccctcagagcatggctctgggcaccactggacacatctgtttcaggataatttgaagtccagttgttcagacagagttgatcttaagaccatggtgg

SEQ ID NO: 123 - DNA, 401 bp, Homo sapiens
agtcaactcaggctgccataacagaataccacagaccaggtggtttaaacagcagatatttacctttcacagctctggaaactgggaagtctgggattaagctgccagcatggtcaggttctggtgaggggtcacctcttggcttgcaggtgtccaccttcttgccgtgtgctgtgtgtggtggagagatctctccttacragggccctgattccatcatgagcccatctaaccatgattacctcccagaagccccacctccaaataccatcccattgggggttagggtttcaacatatgaattttgagaggacacagacattcagtccataacaccaaatctgtattcatcctagttcagcacagagcagaacctatgtttacccaatatcctttgaata

SEQ ID NO: 124 - DNA, 401 bp, Homo sapiens
gccaaaaattatagcattcaaaaaatgtgccacaaaaacaacaaagttgacaactactgatctggaacctttctaaatgtgaccagtcagagaccatagccaatattttctattgtctatagaatgggatgggcagagaaaacagctaacaaaaaaggaaaaaacaacccaaaatatttcatggtttcagctttattagcmtaacagtcaagttgttytggttccacgacttttaaattaagcgaaggagaactctcccatcaataggttcattgtgatgccaaactttacatattttggaaaaacattcatttacccgccaggcaagctgcctsctctcttagagttcgtggtagggaactataagcataaagacctttctgaggaggttttccttattt

SEQ ID NO: 125 - DNA, 401 bp, Homo sapiens
tcaaaaaatgtgccacaaaaacaacaaagttgacaactactgatctggaacctttctaaatgtgaccagtcagagaccatagccaatattttctattgtctatagaatgggatgggcagagaaaacagctaacaaaaaaggaaaaaacaacccaaaatatttcatggtttcagctttattagcmtaacagtcaagttgttytggttccacgacttttaaattaagcgaaggagaactctcccatcaataggttcattgtgatgccaaactttacatattttggaaaaacattcatttacccgccaggcaagctgcctsctctcttagagttcgtggtagggaactataagcataaagacctttctgaggaggttttccttattttattgactgcctcatat

SEQ ID NO: 126 - DNA, 401 bp, Homo sapiens
agagaaaacagctaacaaaaaaggaaaaaacaacccaaaatatttcatggtttcagctttattagcmtaacagtcaagttgttytggttccacgacttttaaattaagcgaaggagaactctcccatcaataggttcattgtgatgccaaactttacatattttggaaaaacattcatttacccgccaggcaagctgcctsctctcttagagttcgtggtagggaactataagcataaagacctttctgaggaggttttccttattttattgactgcctcatatatttacaacttcccaatttattttttcagactgctaactcctgtgttcctagattcccatttttcaattgattgtgggctttttctagggttacagatttaacttccatgcaagtgg

SEQ ID NO: 127 - DNA, 401 bp, Homo sapiens
aaacaggttgcctatagccttacaagtggcctccttggtttttagtggcatagtgcaggtgagccatatattatgcttctcaatttatttccattggtcagaaaactggtaaaaaattccttttcaatggtatagttttcgaatctcaacagagacttctttggtcttagtgatgagtcttcatggtattttggcttgcaygtagtaacaataatcaagtcattcacccagtgcaagattttggtgtctttatttttaactatttgtattgtgcattatcacatagataaccatttgttttgctggtctcattgctcacgtagaagtctgaatataattctttctcagagtgtgggaaatcatggattgatattcttagtttttgatgtagtgctttttat

SEQ ID NO: 128 - DNA, 401 bp, Homo sapiens
gaagtcaggaactgtgagccacctgccatcttaatttgacatctagtctcactactttcaagcacctccacttcaaaatactcttacaagtgaatcaccattgttaaatggatctttgaaggaattttgacaaccagactgaaaacaatctagacatcttagatatttgtggcttcacagaaaataaaataaaacaacccwtttcagcatcaagttatattttccatagctacagaatctggtaaataactatgttactcattcatctaggtagtttgatactacctactgatactggagttggggagggaagtgctgggaagggaagggtgtggtccctggctagggctccacccctgggcctgtgcccatgaacctaggtgaggacaggcatttctgtt

SEQ ID NO: 129 - DNA, 401 bp, Homo sapiens
cccactccatctcccttctggctcccccatctgctgagagctacttccgctcgctaaaatctttgcactcattctccaagcccatgtgtgatctgattctgctggtataccaaggcaagaaccctgggatacagaaagccctctgtccttgcgataaggcaaagggtctaattgagctgactaatgcaagccgcctacagrgagctaaactgaaagagcacactgtaacacatgcccactggggcttcaggagctgtaaacattcrcccctagacactgctgtggggttggagccccacagcctgcccgtctgcatgctcccccttgaggtttgagcagcggggcaccagagaagtgagccactctccctgtggcacaccctgtgaggggsacaagggaac

SEQ ID NO: 130 - DNA, 401 bp, Homo sapiens
cactcattctccaagcccatgtgtgatctgattctgctggtataccaaggcaagaaccctgggatacagaaagccctctgtccttgcgataaggcaaagggtctaattgagctgactaatgcaagccgcctacagrgagctaaactgaaagagcacactgtaacacatgcccactggggcttcaggagctgtaaacattcrcccctagacactgctgtggggttggagccccacagcctgcccgtctgcatgctcccccttgaggtttgagcagcggggcaccagagaagtgagccactctccctgtggcacaccctgtgaggggsacaagggaacttttcccattttactaccaaggccagtgacatgaatgatcaaatacyaaccagctacattttatt

SEQ ID NO: 131 - DNA, 401 bp, Homo sapiens
ccgcctacagrgagctaaactgaaagagcacactgtaacacatgcccactggggcttcaggagctgtaaacattcrcccctagacactgctgtggggttggagccccacagcctgcccgtctgcatgctcccccttgaggtttgagcagcggggcaccagagaagtgagccactctccctgtggcacaccctgtgaggggsacaagggaacttttcccattttactaccaaggccagtgacatgaatgatcaaatacyaaccagctacattttatttaatttttaatttttttagttgtcagaagattttattaactgtaagccagggaatggactgatcgattttattatgcaaatcaatgaaaaaaaaaaactcttttagaaggacacaaacacacaca

SEQ ID NO: 132 - DNA, 401 bp, Homo sapiens
caggagctgtaaacattcrcccctagacactgctgtggggttggagccccacagcctgcccgtctgcatgctcccccttgaggtttgagcagcggggcaccagagaagtgagccactctccctgtggcacaccctgtgaggggsacaagggaacttttcccattttactaccaaggccagtgacatgaatgatcaaatacyaaccagctacattttatttaatttttaatttttttagttgtcagaagattttattaactgtaagccagggaatggactgatcgattttattatgcaaatcaatgaaaaaaaaaaactcttttagaaggacacaaacacacacacgtgctcacagggaagctggttgttggttgagagtcaggtcagaaccttggagagct

SEQ ID NO: 133 - DNA, 401 bp, Homo sapiens
gctctcaaccagctacattttaaaccctattttctctaaagatacatcaacagattagcttattcttcagtcctggatctaacataatttgtacagtaaagtgaagataaagtttattcagattatttgtacaagtactttctcatcaaagtgcagcagtctactttctgtttcccatgggtgataggagatagggttaaygaaacagcagtaatttagagaccagttttagctgcatattgcartctttctttagaactatcctaaaagctgtctgttgctttgaaatgaatcttacttccatttcctccttttcttttggacctgctcaggagcaataaaatagagcaaatgtaaacagcagaaatgagacagaaggggacttggagataaaagaaatt

SEQ ID NO: 134 - DNA, 401 bp, Homo sapiens
catcaacagattagcttattcttcagtcctggatctaacataatttgtacagtaaagtgaagataaagtttattcagattatttgtacaagtactttctcatcaaagtgcagcagtctactttctgtttcccatgggtgataggagatagggttaaygaaacagcagtaatttagagaccagttttagctgcatattgcartctttctttagaactatcctaaaagctgtctgttgctttgaaatgaatcttacttccatttcctccttttcttttggacctgctcaggagcaataaaatagagcaaatgtaaacagcagaaatgagacagaaggggacttggagataaaagaaatttgtttcttctgcattcttcagaatgcagagtagttcctggcaga

SEQ ID NO: 135 - DNA, 401 bp, Homo sapiens
aggctctgctttctaagaaatcaggagtaaggtactgactaccccagagctgtctcacttggagctctttccctcaagcttttctgtttagtgtttttgtttgccatccaaggacataaaaagagaaggatccttcctcaaaaaccatgccctcagtctcctatgttactcctttttttggtgctgtgtaatagttatttyacaccataataaatattagctatacttgccattgtataggtgtaggggaggatgaggaggttcaaactgtattcccaacatcataacttcctgttacatccaagagctgttgaacaatatcgagtttcccaacrtatgtgtgattggaatcaaaggaggagaagaaagggagacagttcagaagataatatctgtggaaa

SEQ ID NO: 136 - DNA, 401 bp, Homo sapiens
tcctcaaaaaccatgccctcagtctcctatgttactcctttttttggtgctgtgtaatagttatttyacaccataataaatattagctatacttgccattgtataggtgtaggggaggatgaggaggttcaaactgtattcccaacatcataacttcctgttacatccaagagctgttgaacaatatcgagtttcccaacrtatgtgtgattggaatcaaaggaggagaagaaagggagacagttcagaagataatatctgtggaaataatggctgggaattttcaaaaaataatgacagaaaccaaaccacagatccaggagtctcagagaacagcaagaacaaaaaaacaaaaaacactcactcctctccctacatacacatgctgtggcatagcataa

SEQ ID NO: 137 - DNA, 401 bp, Homo sapiens
ggaggagaagaaagggagacagttcagaagataatatctgtggaaataatggctgggaattttcaaaaaataatgacagaaaccaaaccacagatccaggagtctcagagaacagcaagaacaaaaaaacaaaaaacactcactcctctccctacatacacatgctgtggcatagcataaaaccaaaaaaacagacaaaaycttaaaggtagtcagagaaaacraaacattacataaagmggaacaaaggtacagtggtgcaaagaattacagtaaactttttgtcagaaactatgcaagccagagacaatggagcaacaactctaaagtgctgaaagaaaagtatttgttaaccaaaaattctacaccttgtgaaaataccttaaaaactcaaggtaaat

SEQ ID NO: 138 - DNA, 401 bp, Homo sapiens
tcagaagataatatctgtggaaataatggctgggaattttcaaaaaataatgacagaaaccaaaccacagatccaggagtctcagagaacagcaagaacaaaaaaacaaaaaacactcactcctctccctacatacacatgctgtggcatagcataaaaccaaaaaaacagacaaaaycttaaaggtagtcagagaaaacraaacattacataaagmggaacaaaggtacagtggtgcaaagaattacagtaaactttttgtcagaaactatgcaagccagagacaatggagcaacaactctaaagtgctgaaagaaaagtatttgttaaccaaaaattctacaccttgtgaaaataccttaaaaactcaaggtaaataaagattttcttagacacacaaa

SEQ ID NO: 139 - DNA, 401 bp, Homo sapiens
gtggaaataatggctgggaattttcaaaaaataatgacagaaaccaaaccacagatccaggagtctcagagaacagcaagaacaaaaaaacaaaaaacactcactcctctccctacatacacatgctgtggcatagcataaaaccaaaaaaacagacaaaaycttaaaggtagtcagagaaaacraaacattacataaagmggaacaaaggtacagtggtgcaaagaattacagtaaactttttgtcagaaactatgcaagccagagacaatggagcaacaactctaaagtgctgaaagaaaagtatttgttaaccaaaaattctacaccttgtgaaaataccttaaaaactcaaggtaaataaagattttcttagacacacaaaaatggtgagaattcat

SEQ ID NO: 140 - DNA, 401 bp, Homo sapiens
taaatattagctatacttgcctaggtataggtgtagtaggtggtgaaaatggaaataatgaaggtaaaattaaattaattttctaaatattcttaattactctaaaacaatggttctgaaccccaggagatccctttccattacgattcttccccatgggaacactggcaatgtctggagacatttttgattgtcacagcyggggtggtgctactaatgctagtaggtaaaggtctgggatgctgctgaacaccctactatacatgggacagactcacacaaacagaattctccagtccaaaatattaatattgctgaagtttagagaatctgctctaaaagataacttctaaagcaaaaacagtaacactgtattgtgtgtttacagtatatataaaagt

SEQ ID NO: 141 - DNA, 401 bp, Homo sapiens
agagaatctgctctaaaagataacttctaaagcaaaaacagtaacactgtattgtgtgtttacagtatatataaaagtagagggtatgaaagcaatagtacgattaatgggggggaggaattgggactaactattgtgatgtccctacatagcacaggaaacaatgttatttgaaggtaggctcttgttaattaaagacgyatattttaaaacctaagacagccaataaaaataattaagataaaatggaataataaaatacattcaattaaaaaagaagagcctgaaaaggagagcagaaactaaagaatagatagaacaaatataaaacagctagcaagatggtggattttaattgagccatttaaataaccacataaacctcatttawtgagacctga

SEQ ID NO: 142 - DNA, 401 bp, Homo sapiens
attaaagacgyatattttaaaacctaagacagccaataaaaataattaagataaaatggaataataaaatacattcaattaaaaaagaagagcctgaaaaggagagcagaaactaaagaatagatagaacaaatataaaacagctagcaagatggtggattttaattgagccatttaaataaccacataaacctcatttawtgagacctgaattaacttaaaaccaaatcaaagacatgacaaaagaaaaatgttatgtcattatccctcatggacatatctatccacatcaaaatacattagtcccacttattggtgggggatattttccaagaccctcagtggattcctggaactgcagatgataccaaaccctatatatactatgcatgaatttcttg

SEQ ID NO: 143 - DNA, 401 bp, Homo sapiens
cagtggattcctggaactgcagatgataccaaaccctatatatactatgcatgaatttcttgttccttcttcacaacagataaagtcacagatggaaaattagttttcatcatggatcttagtaacttcagcatacgattttttttctttccatattaagtcaagaactttcaccttttcacttaaaggaggcactgatgscttcttttttggtagatctgaatggctagcatcactactcttgtgctctagggccattacaaagtaaactaagaatgacttgaacacaarcatcacaatactggatactatgatggttggtctgataaataagacaactcctgagtgagtaacaggtgtgggrgagggtacagacacatggataccctggacaaaaggag

SEQ ID NO: 144 - DNA, 401 bp, Homo sapiens
gatggaaaattagttttcatcatggatcttagtaacttcagcatacgattttttttctttccatattaagtcaagaactttcaccttttcacttaaaggaggcactgatgscttcttttttggtagatctgaatggctagcatcactactcttgtgctctagggccattacaaagtaaactaagaatgacttgaacacaarcatcacaatactggatactatgatggttggtctgataaataagacaactcctgagtgagtaacaggtgtgggrgagggtacagacacatggataccctggacaaaaggaggattcaccttcctggtggggcagagccaggcggtgtgagattttgtcatgctatccagagtggtgtgcaatttaaaatgygtgaattgtt

SEQ ID NO: 145 - DNA, 401 bp, Homo sapiens
agaactttcaccttttcacttaaaggaggcactgatgscttcttttttggtagatctgaatggctagcatcactactcttgtgctctagggccattacaaagtaaactaagaatgacttgaacacaarcatcacaatactggatactatgatggttggtctgataaataagacaactcctgagtgagtaacaggtgtgggrgagggtacagacacatggataccctggacaaaaggaggattcaccttcctggtggggcagagccaggcggtgtgagattttgtcatgctatccagagtggtgtgcaatttaaaatgygtgaattgtttatttgtggaattttccatttaatatttccagaacaccactgaccataggtaactgaaactgtagaaagtgaa

SEQ ID NO: 146 - DNA, 401 bp, Homo sapiens
ttgaacacaarcatcacaatactggatactatgatggttggtctgataaataagacaactcctgagtgagtaacaggtgtgggrgagggtacagacacatggataccctggacaaaaggaggattcaccttcctggtggggcagagccaggcggtgtgagattttgtcatgctatccagagtggtgtgcaatttaaaatgygtgaattgtttatttgtggaattttccatttaatatttccagaacaccactgaccataggtaactgaaactgtagaaagtgaaaccatgaataagaggagactattgtattggcaagttgaatatagcaattttcaactttttattwaaaaagttgaaaattactaggctgggtgcagtaattaaaattaaaaaatttaa

SEQ ID NO: 147 - DNA, 401 bp, Homo sapiens
caggcggtgtgagattttgtcatgctatccagagtggtgtgcaatttaaaatgygtgaattgtttatttgtggaattttccatttaatatttccagaacaccactgaccataggtaactgaaactgtagaaagtgaaaccatgaataagaggagactattgtattggcaagttgaatatagcaattttcaactttttattwaaaaagttgaaaattactaggctgggtgcagtaattaaaattaaaaaatttaaaaatattaaaatttttattttaatatttttaaattaaaatatgtaaaaatactaggctgggcgcagtggctcatgtctgtaatcccagcacttcaggaggccgaggttggggaactgcctgaggccaggagtttgagaccagcctga

SEQ ID NO: 148 - DNA, 401 bp, Homo sapiens
gggaactgcctgaggccaggagtttgagaccagcctgaccaacatggtgaaaccctgtctctactaaaaatacaaaaattagctgggtatgggggtgtgcctgtaatcccagctacttgggaaactgaggcaggagaatcacttgaacctgggaggcagaggttgcagtgagctgagatagcaccactgccattcagcctrggtgacatagtgagactccatctcaaaaacaaaaacaaaaacaataaacaaaaaaacactacacagtgaagtgaggcttacatgggcatgtcatgctggttcaatactaaaaaaattcagtcaatgtaactcatcatattaatgatgtaaagaaaagccacttgatcatatcgacagatgcagaaaaagcatktgaaaaa

SEQ ID NO: 149 - DNA, 401 bp, Homo sapiens
tcagcctrggtgacatagtgagactccatctcaaaaacaaaaacaaaaacaataaacaaaaaaacactacacagtgaagtgaggcttacatgggcatgtcatgctggttcaatactaaaaaaattcagtcaatgtaactcatcatattaatgatgtaaagaaaagccacttgatcatatcgacagatgcagaaaaagcatktgaaaaattcaccagccattcatgatgaaaagtgtcagcaaactactaacagaaggaacttcctcagcctgataaagggcatataaaaaaactgtatagctaacatcatttttaatgctgaaagactgaattcttactctctgaaatcaagaacaaagcaggaacgccactctccccagtcctataatttacagcactag

SEQ ID NO: 150 - DNA, 401 bp, Homo sapiens
ggaacttcctcagcctgataaagggcatataaaaaaactgtatagctaacatcatttttaatgctgaaagactgaattcttactctctgaaatcaagaacaaagcaggaacgccactctccccagtcctataatttacagcactagatgtcttaactagtccactgaagcaataagaagaaataaaaggcatggaggttgraagaagaaaaaaactgcccctatttgcagacaacatgaacatttataaaatctaggaatttagaaaaaggcttctagaatgaaaagtaggtttatcaaaattgcgggacacaggccaatacccaaaaccaactgtttttccataaactggtaacaatcggaaaccacaatctgaaaatgatatcatttactatagctcca

SEQ ID NO: 151 - DNA, 401 bp, Homo sapiens
cccagcaagttttttcttgtaaataaagacaagctgattctaaagtttatatgcaaaagcaatggaactagaatagctaaaacaacttagaaaaagaatacagttagaggaatctcattactagattttaagacttactataaagcaacagtaatcaaggcaatgggatagacacatagatcgatggaacagaaaagataycccataaatagaccttcacaaatatggtaatttgatttttgataaaagtgtaaaataattcaatggagaaagggtggtcttttcaacacatggtgttggaacaatctgtcattcacatgcaaaaggagacatgcatcctcaactttatccctcataccaaaaattaattgactcatagctctaagtattcactgtaagac

SEQ ID NO: 152 - DNA, 401 bp, Homo sapiens
tcacattgctgtgtgcctagtgctgtatccgcctatgttgctgccttgagaatgcagcttcatgactgggacttgcttcagtctagggcagggagaacaaaaagaggaaaaaaaaatgaggatttgcccacagatcctccatcccacgggggcccttctttcaggttttctggttagaaacagaggatttctctgggaacyttttctgcccacagttgctgtgcagttcctggatttgcattgccctgcagtctaagctggaagatatggaatgaaaagatgtcaggaaattcactgccctctgggttactttcaggatttgattttcttcccaaatatgcctgctattatttactaatcagcctccagatgctcactttatgtattctgtccaaggattt

SEQ ID NO: 153 - DNA, 401 bp, Homo sapiens
tgcatttaacatctgctagccacagagaagacaaaccttgtagctgtagaagaccccaaactgctgcagcccttttgagctctctgagccagagactccctgtattgcttctgggcaataccacctggacacatgtgccccctcaccgatccccgtctcccctggaatttcccttgccctcttcttctgggtgtctctggramgtcttctgctgtgaggactttcccttttctgcaatcctgtccaataaagcttgcgttgtgcaatattgccttcttgttctatctttctgtcttttctttgatcagcccccagatcctcaaactcaccattgttctctgctattatttttcttttaatgygcattaatacacacacatatatatacacacacatataca

SEQ ID NO: 154 - DNA, 401 bp, Homo sapiens
catttaacatctgctagccacagagaagacaaaccttgtagctgtagaagaccccaaactgctgcagcccttttgagctctctgagccagagactccctgtattgcttctgggcaataccacctggacacatgtgccccctcaccgatccccgtctcccctggaatttcccttgccctcttcttctgggtgtctctggramgtcttctgctgtgaggactttcccttttctgcaatcctgtccaataaagcttgcgttgtgcaatattgccttcttgttctatctttctgtcttttctttgatcagcccccagatcctcaaactcaccattgttctctgctattatttttcttttaatgygcattaatacacacacatatatatacacacacatatacaca

SEQ ID NO: 155 - DNA, 401 bp, Homo sapiens
ctggaatttcccttgccctcttcttctgggtgtctctggramgtcttctgctgtgaggactttcccttttctgcaatcctgtccaataaagcttgcgttgtgcaatattgccttcttgttctatctttctgtcttttctttgatcagcccccagatcctcaaactcaccattgttctctgctattatttttcttttaatgygcattaatacacacacatatatatacacacacatatacacatatatacactctttggaattcttttccttgtatgtctcttcaatattctctcacacttccttcaaatgtctgcccaaaccttgcttctcaatgagtccttccttgaccaccctttctgatactgcaacctgccttccattttacctccctgcttttcca

SEQ ID NO: 156 - DNA, 401 bp, Homo sapiens
tttctctgctaatagatctataaaatgtggaaagagatgttttacaatctctcatagcaatcctattttttgttttacataatttgatgcttttatatgaaacataaagtttcatggctattataaattttatgtagattttgcctttcatgaatataaaatgaccttcttttctatggaaaccttttttttttttttttwaccttatattaaattttgtttgaaatcaaaggggccatcctttctgtttttaaaatttcatttgtctggtaagcctttgcttattctttcaaaacatttctcattttaatgtgtctctttaagcttaaatagcgtatgtctagatttttaaaatctttttttaaatggggagttgaaataacttaaatgtattatcataa

SEQ ID NO: 157 - DNA, 401 bp, Homo sapiens
gcccaccactcacctcctgcttttcagcctggttcctcccaggccctggactggtatcagtctgtggcccagggattggggacccctgctatatacaggggtaaaaaaagagggaagaagagagaatttggttaaaatatattcatagaaggaaggaagtgtgaagagaaatcacggtccttattgcttccattggttatrtggttgcagatccatgctgcccagtgaaagttcttgtaatgatgcaaatagtttgtacctgcactgttcaatgcagaagccacctgtggccagcaaacactcaaaatgtggctggtgaaatgagaaactaatattttaattgcatttaattttaattaatttacatttggatttaaatagccacrtaaggctggtggctc

SEQ ID NO: 158 - DNA, 401 bp, Homo sapiens
gcttccattggttatrtggttgcagatccatgctgcccagtgaaagttcttgtaatgatgcaaatagtttgtacctgcactgttcaatgcagaagccacctgtggccagcaaacactcaaaatgtggctggtgaaatgagaaactaatattttaattgcatttaattttaattaatttacatttggatttaaatagccacrtaaggctggtggctccaatgctgtacagcgtagctgtgaatagaatgatattccctttgtcttcagccatacgtcagtgaactgggatctctcccagtctaattctttgctcaatttcaggacaaccgagaaacctagctaattttgcctctatgagacttccatagtcattcactcaaaactcatcattgaacatgtta

SEQ ID NO: 159 - DNA, 401 bp, Homo sapiens
ctaggtcagaaacaatatcctttgaggcaccatgcctgtcatgactatatatgaggtattcagtaatggttgcacttgtagaagcatagttgggaaggaaagcatatcaaagtccaaataataagtgaagataaatggcacctttatcaggaaggaaggttgccaatgcaattaaccttgtgctaggtagctggctaggtrgctatcccccaaaggcatggtattatattgggggctccaggttggtcttttaatgggaaagttgagcaaacagcagatgtgttatctagggaagagagggttggctgacaatagagaaggtmattttatctacctgattattaaaagcatccctgcactgggtattcacgtttgatacaaatattctctccctttgggcc

SEQ ID NO: 160 - DNA, 401 bp, Homo sapiens
aagtgaagataaatggcacctttatcaggaaggaaggttgccaatgcaattaaccttgtgctaggtagctggctaggtrgctatcccccaaaggcatggtattatattgggggctccaggttggtcttttaatgggaaagttgagcaaacagcagatgtgttatctagggaagagagggttggctgacaatagagaaggtmattttatctacctgattattaaaagcatccctgcactgggtattcacgtttgatacaaatattctctccctttgggcccattctgagggtcctctagaatagtagctgaaattggggttaaaagctgcttaaattttgacagtctgctttacttctctaaataccagacatcttcaccaggttattcccttgatcttgtg

SEQ ID NO: 161 - DNA, 401 bp, Homo sapiens
attgaatcaatttgcatttaaatcctactattgtgattttatctttttgaaaattatcctaccttgagtcttttttctctcttttctatgcatattagtcttttattcttagtcttttttttttctttgtatcttggctttctgcttctgtttcatagaagtcatgcattctaataagtatggcaaactaatggaaatttytcctttctttagcaaatcattttcagatatttgttatccttgtacatttttaaggtgatctttcctttcattttcattgcagtattttaaaaatcaactttagtgaggtatcatttacatttattaatatacacccattttaaatgaacacttcaatgccctttgtatatatccatatattcactaccacaatcaagata

SEQ ID NO: 162 - DNA, 401 bp, Homo sapiens
atgttcagtggtaactcttcattctaggttgtcagaactcagatacctcctgtactgcctgaggaagttgttcagcttccagcttccctgtaggtttttcctagaagccattctttgcctggttagtcctacgttgcctgttgttcaatgtctgaaagtagttgttacatatattttgtctagatttctagatgtttatgrtcggaagcctagtctggtactggtacatcatcatggctggaagcaaaaatcatattgtagtattttcttttttaatttttattttttgagtcagggtcrgggtctcactttgtcacctaggctagaatgtagtggtacaatcatagctcactaaaacgtcatactcctggcttaagtgatccttcctccccagcctgctg

SEQ ID NO: 163 - DNA, 401 bp, Homo sapiens
cctagaagccattctttgcctggttagtcctacgttgcctgttgttcaatgtctgaaagtagttgttacatatattttgtctagatttctagatgtttatgrtcggaagcctagtctggtactggtacatcatcatggctggaagcaaaaatcatattgtagtattttcttttttaatttttattttttgagtcagggtcrgggtctcactttgtcacctaggctagaatgtagtggtacaatcatagctcactaaaacgtcatactcctggcttaagtgatccttcctccccagcctgctgagtagctaggagtataggcactcaccatcaggcccagctgattcattgttttgttgttgttaaagatgggctcccattgtgttgtccaagctggtcttt

SEQ ID NO: 164 - DNA, 401 bp, Homo sapiens
ctcaggctggagtgtagtggtgtgatcttggctcgctgaaacctctgtctcccaggatcaagcgaatctcctgcctcagcctcctgagtagctggattacaggtgcatgccaccacacccagctactttttgtatttttagtagagacagggtttcaccatattggccaggctggtctcgaactcctgacctcatgatccrcccgcytcggcctcccaaagtgctaggattacaggcatgagccacagcacctggccatattactctttttagaaaaccagtctaattatttcttttctttttttttttttttttttttgagacagagtctctttctgtcatcaaaactggagtgaagtggcacagtcaccactcactgcagccttgacctcctgggctta

SEQ ID NO: 165 - DNA, 401 bp, Homo sapiens
ctggagtgtagtggtgtgatcttggctcgctgaaacctctgtctcccaggatcaagcgaatctcctgcctcagcctcctgagtagctggattacaggtgcatgccaccacacccagctactttttgtatttttagtagagacagggtttcaccatattggccaggctggtctcgaactcctgacctcatgatccrcccgcytcggcctcccaaagtgctaggattacaggcatgagccacagcacctggccatattactctttttagaaaaccagtctaattatttcttttctttttttttttttttttttttgagacagagtctctttctgtcatcaaaactggagtgaagtggcacagtcaccactcactgcagccttgacctcctgggcttaagcgat

SEQ ID NO: 166 - DNA, 401 bp, Homo sapiens
gtttacatttctaccataagtatatctttctcagtattttagtaagaaatgtggtaagcattaaaatttaaaccaggctgggtgtggtggctcatgcctgtaatgccagcactttgggaggccaaggtgggtggatcacgaggtcaggagttcaagaccagcctgaccaacatggtgaaaccctgtctctactaaaaatayaaaaattagccaggtgtggtggcacgcgcctgtgatcccagttactcaggaggttgaggcaggagaatcgcttgaaccccaggaggtggagatggcagtgagccgagattgtgccattgcactccagcctgggcaacagagcaagactccatcaaaaaaaaattaaaccagaaattccctttattcatttttagcccaga

SEQ ID NO: 167 - DNA, 401 bp, Homo sapiens
tcatttatatctcattaactagtttcctgtttttattttaaaacccagatatcacagtgaaatttaaactcatattcataaaggaaaacaatctgcaaagtccaatctagtttatatcattagtaagaataatagtatggtttaaataagatctatatatttttactaatattcgttctgctttcacaaatatattgccaygtgtagayctctccttcataccaagagttcagttggcaccatgaacagttcaaaacactaatacttgtgatcacagtattggttcttaattaaacgtacaattcccccccacacactatttatggattgctaaaacaatattttcacctttatctttggctgtcagatagcaagttggacagtgaagtagaactgacaga

SEQ ID NO: 168 - DNA, 401 bp, Homo sapiens
atctcattaactagtttcctgtttttattttaaaacccagatatcacagtgaaatttaaactcatattcataaaggaaaacaatctgcaaagtccaatctagtttatatcattagtaagaataatagtatggtttaaataagatctatatatttttactaatattcgttctgctttcacaaatatattgccaygtgtagayctctccttcataccaagagttcagttggcaccatgaacagttcaaaacactaatacttgtgatcacagtattggttcttaattaaacgtacaattcccccccacacactatttatggattgctaaaacaatattttcacctttatctttggctgtcagatagcaagttggacagtgaagtagaactgacagaaatgaaga

SEQ ID NO: 169 - DNA, 401 bp, Homo sapiens
atgtgtaacaatactcagttagtattgccaactatgtgtctgttgtcacatggcactatttaacactgagctgtggtgaccagagttttcagttgggtttcagacacatagaatggttggctaactcaatctccagcccctctggaggcagagctgatactgtgtaacccaaaacttctaccataaatcccattgctagawgatctgggatggcccaaggctcttagctaaactaagacagtcctgtcaggcagaacattctaagggttcagagattgtctcccaggatccaaggacaaaggtcagacctctctttgggcaagattaaattctgtattacacaataccagatgagcagctgtcttttgatggctgtaaatggatagtgaaggatattttca

SEQ ID NO: 170 - DNA, 401 bp, Homo sapiens
gtctccatgtcctgtagttcacctttttgagatgcccaggtgggaaggactccctggcagaacttccaacagacctgtgcgctgggagcaacgcgcactcgggtggagtcttgggaagtttgccccgtttccagtggggaggagcctggaccccctcttcctgggtggaacctgggattcagcctgcggggcagcaagcaygctagcaggactctggctttgagaagggtccctttttccccctttttgcccaataaatttcattttttctcacccttcaaagtgtccgcgagcctaatctctgatggtcatgtgacaagaacccggctcttagctgaactaaggaaaatgtcctacaacatttcgacataaacagccaaattccattctattttaatact

SEQ ID NO: 171 - DNA, 401 bp, Homo sapiens
gatgtaggtctttaacaattatgctaagtgaaataatccagacacagaaaaacaaatagcatgtggtctgtcttatatggtagaatctaaagaaggtgaatttgtagacggagagaattacagtggtgcttgtcaggcactgggtagcaggatggtttagagggaattggagagctgttggtcaaagggttcacgctttcwgttataagaacaacttctggggatctaatataccatatgagtggtgatggatgtactaattaagttgattatggtaaccattcacaacgtatatgtacatcaaatcattgttttgtacaccttgaacgtattcaatctttatcaattaaatattttaaaataaagaaatagatggggaaatatatttattgaacacctat

SEQ ID NO: 172 - DNA, 401 bp, Homo sapiens
gcttttttttctagtataaagagttcaattagggtaactctgccccttacctcatttgtcctggtgatacgtatgaaataacaccaatttgctagttagattaattgtgattagtgattagattaattgtgtgcactccacttcttcttgctcatcttccttttaggaggaaggctgcccttggaggggaaatgttccctmtgttcctttcgcccatgagaatgggcctgctgtcttgtccactactgcctgtgactggctcagaagtgggcctaatgctgggattcattgaatgtgccttcctacccagctgtatctttgtaaatattgatcttttagtttctatctttaatcttttatgtttatttttcaaatttttcagaagcttatttgggaagaag

SEQ ID NO: 173 - DNA, 401 bp, Homo sapiens
tttaaaaccaacccccgtgttctcttcacaaattgaagagtggagatttttggaaagtattacaccccttcttccccttcctagcatggataataaaatctcactctctttttgtcacacttcactcttgttatattggcttctttttacaagctacaagcagccagacccttttgccaattacatgcccattatgaggcytatggaaaatgttgtgattaaaggagttccttttccatgggcaccccatgtgtacttctgcaaaatggaacaatagcttgaaaagccttaccagatttgctgtctcagcttcccctgtgggtcttactgatcaaggacattatagtaaataaaaaaaaaatgagagagacaaagaagagagtcatggacttgtcccagca

SEQ ID NO: 174 - DNA, 401 bp, Homo sapiens
tattgatggtgttgaaacaaaagtattaatgcagcactattgaaggttagatgaaccaatgggactttctgtttgtctcccaacattgaaaggctccaacaagttttctccatttaccccagtttggagaaacttaaaaagtcagagattactcagaactggttggggtgacggttaagcaggttaatcaagattgatgargggccagggtctcctggccagacctcaggctggcaggggtcccaaggacatatgcacatgtgtagataaaatggtcagtggaaggagaagagacttttctgggactccttggtataggaggtcaatgcattgtaattccaaaagctgttggtgaagacttaacaggagttaaagttaagattgggggagtatatggagct

SEQ ID NO: 175 - DNA, 401 bp, Homo sapiens
aaacagtagattattgaggcttaaatacataaatttgtacctcagtacaattttatagcctcagtaattttagtcatgatttcaatcatacaaaaagactgctactcagtgatcgaccttgcaaacattcttctctcagtctcagaaagtgccaaacactgtttgctcttatatgggaaggatcccagtttatgtatactrtgctaccatagggtcatctgaactcactggtttactgtcataatttggtcagaagggatttggatttgatgtaggtctcaagtgtaataatacactatattgatgatgagatgataatattggaaactaaagagccaggttaagactgagttgaatgcagcgatgactcacatgaccaaccaaggctgatcagtaaattc

SEQ ID NO: 176 - DNA, 401 bp, Homo sapiens
cacttttctgggggatctggcaaagcaggggtggaaatctccctcctgctgccagtgtggttatatgatttttcccatataatctcactttttttttgtcccagtaagaagcactggagcactgcctgatgccaagggtcctaggaccagggatgtgactgtgtacatcctcgtaagcaaggatgatttctaggcaagaargtgtaactaacttttaaacatctatgccagaagtcctaagggcctgatagtgtgaattcacatctgtgaatattgctgtgttgcctagggattgggctagccctgacatccccgataggacagttctgtacccaggtaacctgaccctatctgaatggaaatggactgaaagggaggcatttgttagactagcatcactg

SEQ ID NO: 177 - DNA, 401 bp, Homo sapiens
cctctggtaggattaaagaagttggcatcacattgtagatccaagttcccctggggaatgaccccactcgaaataaggaaggctgtgagaggccttatggcacactcaaattaaattacatctacctgtaaacaccaatcatctaactctagtgtggggacccaaaattttttgcaaaacatttatcctaactgcattcgygccattagtacgcaataccaatgatatgcatggtagattaaacaacactggctcctaagacagaaaagggcctcaggagagataggtgcaggtctaggtatcctgggacaagctgagtttactcttaatgtggagcagcattcggaggaaaaagatttattaactagaagagacagaatagaggaaattctcttcaagga

SEQ ID NO: 178 - DNA, 401 bp, Homo sapiens
cttctcaaaagaagacatttatgcagccaaaaaaaacgtgaaaaaatgctcatcatcactggccatcagagaaatgcaaatcaaaaccacaatgagataccatctcacaccagttagaatggcgatcattaaaaagtcaggaaacaacaggtgctggagagggtgtggagaaataggaagacttttacactgttggtgggrctgtaaactagttcaaccattgtggaagtcggtgtggcgattcctcagggatctagaactagaaataccatttgacccagccatcccattactgggtatatacccaaaggattagacatcatgctgctataaagacccatgcacacgtatgtttattgcggcactattcacaatagcaaagacttggaaccaacccaaat

SEQ ID NO: 179 - DNA, 401 bp, Homo sapiens
ggaacctgaggacctaccacttgtgattgaatctgaagttgggggcagtctggtggggctacagccttaacctgtgcagatactaattccagttagtgtcagagttgaattgaatcataggtcatctagctggtacaggagaattgtacagtgtgggaaaaaaaatccatatctgactacagtagtgtagagtgtgagtayagagaaaaacagttgatttttcctatacattttatgtcagaagtgaagcacgtattgagaatggtgtgagtatagaaggaaaagcagtttgtgtttctctatatacaagcccaggccacatggagagatatgtgcaggtattctagccgacaaccccagctgaggtctcagctgatagaatcaacctccaactataagtg

SEQ ID NO: 180 - DNA, 401 bp, Homo sapiens
ctaacctaccgagcctgctgaaattgcagattatgcgaaaactaaatatagccgttattttaaaccactgcattatgaggtaattattatgcagccacacaaacaggaatggaacccattttattcaatgacagcttctgccactttgctgaagccttaatcatgaattatatggcaagaagtagatttacatttatgaayaggtcaagaggaaagaaatgaagtcttgttagaacaactgtgtttctggaaaaactttttctctggtaaaagtttcagcaattgtgttagtttctcgtggctgtcgtaatgttaccaccaatttggtggcttaaaacagcagaaatttatgctctcacagttctggaggccagaaatcagaaattggtatcactggtgac

SEQ ID NO: 181 - DNA, 401 bp, Homo sapiens
ctggaggccagaaatcagaaattggtatcactggtgacaccatgatgaacctggacaacattatggcaagtgaaacaaggcagacacagaaagataaatacaggctgatctcattcatatgtgaaatctcagaaagttgaacccataaaattagagagtaaaatggtagttaccagaggataggggaggggagtgaatagsgaaagggaagatatcgattaaaaggtacaaaatttcagctagacaggaggaatacacttagtgattcattgcacagaatggtgactataataaataataatgcattgtgtatttaaaaattgccaaaagagtagattctaaatgtttttaccacaaaaagggtaagtatggtaattagcttgatttgatcattccacaat

SEQ ID NO: 182 - DNA, 401 bp, Homo sapiens
aattctagaaacatataaaaggaattatacaccatgggtaagtaggatttattccaggaatgcaaagttagtttggcatctgaaaattaattagtataatatattgtatcaatagaattaaaaggaaaatgtatatgatctcaatagatgcaataaaagcatttgtcataattcaatactttccaagaatttatacaccaycaacaacccattaacctaggaatggaagagaacttcctcaatttgataaagagcatttataaaaagcccacagctaacactgtacttaatggtgaaagactagattattttctcttaagatcagaaacaagactctctgactgcttctatttgacattgtactggtggttctagtcagggcaatgaggcaagaaaaagaa

SEQ ID NO: 183 - DNA, 401 bp, Homo sapiens
ttttggcaccaggaagtggtttcatggaagacaatttttccacacactggtgggtgatgtgggggctggttttgagatgcaactattccacctcagatcatcaggcattagattctcgtaaggagtgcacaacctagatcccacacatgtgcagttcacaatagaggtcacactcctgtaagaatctaaggctggcactgwtctgacaggaggtggagctgagatggtaatgctcgcttgcccaccactcacctcctgctgtgaagcccgattcctaacaggccatggactagcatctagccatggcctgggggttggagaccccctgcttcaaaggacaccttcaagaaagtaaaaagacaggtcaaagaatgasagaatatgtttgcaaatcatatatc

SEQ ID NO: 184 - DNA, 401 bp, Homo sapiens
ctgtaagaatctaaggctggcactgwtctgacaggaggtggagctgagatggtaatgctcgcttgcccaccactcacctcctgctgtgaagcccgattcctaacaggccatggactagcatctagccatggcctgggggttggagaccccctgcttcaaaggacaccttcaagaaagtaaaaagacaggtcaaagaatgasagaatatgtttgcaaatcatatatctgataagggatttgtatctagaatatatacagagcatgtacaacccaataataaaaagacaacacaactaaaaatggacaaatattgaaaaccggaacaccacaaggatgcccactctcaccactcctattcagcatagtactggaaatcctagccagagcagtcaggcaagaga

SEQ ID NO: 185 - DNA, 401 bp, Homo sapiens
ctcatatctccaactcctttccctcatacacacaatagttttagaataacaatgccatgtgttctacaataataagagaagtgaaaattatttaagagcatttgccctattgtttttctaattctaaaagaaatacatatttaatatggaagagttataaaatagaaaaatcataaagaacaaaagttatttataatccartaacccatgtattatcaatgtgaacattttggaacatttgttattcttgaaaatggtttagatagtaaacttttgaatacaatgagcacctgtcccattatgtattttaaatgggagaataatgatgtgttctcagcttatataaaagtcccgaaccattcttcaaatattactaaaatattcttaagcatctatagaaa

SEQ ID NO: 186 - DNA, 401 bp, Homo sapiens
ttctgcagggcagatgctggctagttaagcttgcctgtaaatcatagtttgtccataaactccagcatattctatttagaaccacagagcgaaaaactaataaatacatttaaaaatcttagtagacattaactccagagaggttcttaatttttaacttgatcaaaattttagctatgtcttagtggtttggttgaattwtaagcagatattgagaactcgcattgctttataaaatgcttgggccgcatgtggtggctcacgcctgtaatccmagcactttgggaggctgaggcaggcagatcacttgaggcgaggagttcaagacgagactggccaacatggcaaaaccctgtctctattaaaaatacaaaaattagctgggcgtggtggtgggcgcc

SEQ ID NO: 187 - DNA, 401 bp, Homo sapiens
tttagaaccacagagcgaaaaactaataaatacatttaaaaatcttagtagacattaactccagagaggttcttaatttttaacttgatcaaaattttagctatgtcttagtggtttggttgaattwtaagcagatattgagaactcgcattgctttataaaatgcttgggccgcatgtggtggctcacgcctgtaatccmagcactttgggaggctgaggcaggcagatcacttgaggcgaggagttcaagacgagactggccaacatggcaaaaccctgtctctattaaaaatacaaaaattagctgggcgtggtggtgggcgcctgtaatcccagctactcgggaggctgaggcacgagaatcgcttgaacctgggaggcagaggttgtggtgagccg

SEQ ID NO: 188 - DNA, 401 bp, Homo sapiens
aaccctgtctcttctaaaaatacaaaaattagtcaggactggtggtgtgtgcctatagtctgcactacttgggagactgaggcttgagaatcacttgaaccagggagacagaggttgcagtgagctgagatcatgccactgccctccagcctggccaacagagagagactctatcttaaaaaaaaaaaagttataaaaaasaagtgatttgaaaaagaaaaagggctttaggaaggacacagaatataaacaaatctcctgtcctcatgacacttaagatttatagggattcctaagtctcctgtactgcatactcaaaatgcagggtcctaagacttacaggaaatattatactcaaatgcactttcttcattcctgtcttgaccatctgtgctgaatcc

SEQ ID NO: 189 - DNA, 401 bp, Homo sapiens
aaacgaataagaaatgtaaatatcctggctgctaattccttgtaagtctagaaagtggttaggtatttgacttgtctcctctggttcttaccctggccattcttgttgctaagaaggaatgatgtctcctgcaaagagcccaccaaacacatttctaccctaagtagcctgctcaaaactcatcaaaagccctactaagaygttttgctgcactgaaccctttcattttatagtttcctcatttagaattccctttcacacgtccattcattcattcaacaaatattaagggtctactatgtgccaggcctggtagtaagaatttggtatagacataatattccttcaagaagcttaaagccaggcacggtggctcatgcctgtaatccccacactttggg

SEQ ID NO: 190 - DNA, 401 bp, Homo sapiens
catggctgcatgaaatgaacaggcacttttctaatatgaacatacagtgaatgaattaataactgtatgtttctaagagccacatttctgttagaactagccatataaggcatatgactaatgaattcagatatttaatattgaagtttaggaaaatgtcatttccactgggctgagaattagagtcaggagcaaatcttyctatctccctctyctacacattcattcattcagcattgtgtgcctattatatgtcaagatagtataatgtatatatttaatattatatatagtatagtataatacatattggcacataaatatgttttttatatatatataatcatcgayagtaacatgtttataggcaatagcaattcaatgtggcaagttttatgaca

SEQ ID NO: 191 - DNA, 401 bp, Homo sapiens
aatgaacaggcacttttctaatatgaacatacagtgaatgaattaataactgtatgtttctaagagccacatttctgttagaactagccatataaggcatatgactaatgaattcagatatttaatattgaagtttaggaaaatgtcatttccactgggctgagaattagagtcaggagcaaatcttyctatctccctctyctacacattcattcattcagcattgtgtgcctattatatgtcaagatagtataatgtatatatttaatattatatatagtatagtataatacatattggcacataaatatgttttttatatatatataatcatcgayagtaacatgtttataggcaatagcaattcaatgtggcaagttttatgacaaggccatacacag

SEQ ID NO: 192 - DNA, 401 bp, Homo sapiens
ggaaaatgtcatttccactgggctgagaattagagtcaggagcaaatcttyctatctccctctyctacacattcattcattcagcattgtgtgcctattatatgtcaagatagtataatgtatatatttaatattatatatagtatagtataatacatattggcacataaatatgttttttatatatatataatcatcgayagtaacatgtttataggcaatagcaattcaatgtggcaagttttatgacaaggccatacacaggatgctatggagcatggaaaggaaggagtccctgagaacatgtcatcgaaactgacttcaaatggagatgtaggtatgagctggttgttagaaacggaatgtttgtgtcaccccgaaattcttgtgttgaaacccta

SEQ ID NO: 193 - DNA, 401 bp, Homo sapiens
tattttgttatggtagccttagcaggctaatacagtggtaaactctgcatatggaggagttgaaaaagagagagtagatggcaatttgggcagaaggggaattacctgcaaatgttcaagggagtggagataattcttcttaaactgtttatcagtccttcaggagataagttaacaacagaggataattatcccagagarctggtttctggcaaatgtctgaagggcatggtaggtcataaaatacccactggtggtattttatattctgaaaaccattttaatctacctttcatgacctggatgcttcagcctcctgtgcttcctcagaatttgataactgacccatgagacaaaaactgatcktttatctagaatcctctagattccagtacaactca

SEQ ID NO: 194 - DNA, 401 bp, Homo sapiens
gataagttaacaacagaggataattatcccagagarctggtttctggcaaatgtctgaagggcatggtaggtcataaaatacccactggtggtattttatattctgaaaaccattttaatctacctttcatgacctggatgcttcagcctcctgtgcttcctcagaatttgataactgacccatgagacaaaaactgatcktttatctagaatcctctagattccagtacaactcagcagctgtgaagcctctaaatttgcaacttgctttcttttaaactcagtagaatccctcagccagaaccaatcctcatgccaattttagaactgttcgatattcccaagaaaagaaaatggctggtgattgtcaactctcttaagaaagtctcttattttggggg

SEQ ID NO: 195 - DNA, 401 bp, Homo sapiens
caggcacacgccaccatgccctgctaatttttgcatttttagtagggacagggtttcaccatattggccaggctggtctggaactcctgaccttgtgatctgcccacctcggcctcccaaagtgctgggattacagctgtgagccaccgcgcccagctggaaatgttcttttgactctgaaattttagttcatcgagtccwcattgacttcacagctctctggtatctttaagtgtattatttttgtaatttatatgcttttttttcctggttactagcaggaacattgatccaccataaccaatttcatgtttctgagaagtgaagctcattttctgttaaagagaaagagagacatgaattccaaaacaggtaaaggtgtctataaaccagtaagttta

SEQ ID NO: 196 - DNA, 401 bp, Homo sapiens
aaagattgccttaggttaggccttatagcttaagaggcaaaaggaagtctcaagtctcctgtttgcttcagcccattaaccaggtttggagatcatacagaaaattaaggtttaagtgctaactagcagtgaaatgtaataaaaaactagttatgactctactgtggttttaaatggataaatgagatcgtgagtccaaasattcagaaactctgatactgttcatattgagagatttaactaaaaataagtttctgctggagagaagaatgaaaggtaagtacagaggaaggcaaggtacaaaggagattttctgagtccagtcagggttagcgtggagaccctgtgcacttggggaaatggaaaaagtggcaataaagagcaaattgtagatagaagca

SEQ ID NO: 197 - DNA, 401 bp, Homo sapiens
ggcaataaagagcaaattgtagatagaagcaatgaaggcccaaactggtaatgtcacacttttgctttgagcaggctggtaatgatttccccaggaaactcaactatgcaaataagaaagcttggaagtatgacttaacgattaatgaagctcacactactttgttcaatggaaaatttgttcttgtctaaatgtccagakagtaacttggttctttttctccagggttatgcagaacagaggagacgcttttctgccagctggaaggggtagcaggtggggtaatggattcccagcttgccagcggctgagattctaattagaatcttccttctggcttttagcaagcagctttcacttcatagtgtccttagagaagaaagttccatattcagcaagaa

SEQ ID NO: 198 - DNA, 401 bp, Homo sapiens
gtagaaggagaaagaaaagagagatatggaggtgagggagggtgaaaatgtgcaatagatgatgacagtgttggagaaggcagaggtttttgccataaagaatctctagctgggatcacttgaggccaggagtttgagaccagcttgggcaacaaagtaagaccccagctctataaataaataaataagtaaataaataartaaataaataaataaataaataaatcagctgggcatggtggtgtgcatctgtagtcccaactactcaggaggctgaggcagaaggatcccttgagcctaggagttcaaggctgcagtgagctatgatgtgccactgcactccagcctggggaacagagcaagatcctgtcttttaaagaggaagagagagagactgactc

SEQ ID NO: 199 - DNA, 401 bp, Homo sapiens
ttttgagattgttatttaaatgccgtttgctattaaactgtggttagaaaatctgctcagccaaaatgatgctgaaagagcattaagtttatgagtcacaaaagccagagtaattctaattactttcctgaacttcagtacaatagagatgtttaatatgcaatgggacactcctttaaaattgttgcaagacaggtgatmggagtcttggcttctctccccaccttgattatcagtgaagtaaaggttaggtgcggtattgtattgtgtgttttcatcttaaagtttcttcttctgcagaatgggttaatgatggaaacatttgggtattgtggtgcacagagtgggttctcgtgtctcttcagagcaaagtcctcttatacatcatcatgagcctcata

SEQ ID NO: 200 - DNA, 401 bp, Homo sapiens
tccagcaggacaagatgtggaggcagaaggcagtgctgttgatgatcctgaccttgtatggggttaggctaatgtgtgtgtttgtgtcttagtttttaacaaaaacgtttaaaaagtaaaggaaaaaaaatcttaaaaacagaaaagagcttatagaataaggttataaagaaagaaaatatttttgcacagctgtacggygtgtttatgtgttattacaagagtaaaaaggtttagaaaatttaaaaattgataaagttgaaaagttacagtaaactgagtttaatttgttatttaagaaagaaaaatattttctataaatctagtctagcctaagggtatagtgtttataaagtatacagtagtgtacagtcaagtcctaggctttacattcactcacc

SEQ ID NO: 201 - DNA, 401 bp, Homo sapiens
actcttataggagataacatcttctagaattattcttcatgtatcttatcttctacctccttttgttcatgtctttatcttcttctgctaattctgggataatttgttgagtttatcttctccagcactcattcatttcctgcatatctttcttactgccatcatccagttagtttggcattatgttttttgacctcactsggacctttctaatttaagtcttcctttgtgaatatttcccagctacagagatgccatggcttcttgaacccttctggaagagaatctaatattttctaaaaatttcttctgaattttggagtaaccctattttaaaaggagatattccatcattttttaaaacaatgactcacttattttggacaccactattttctcat

SEQ ID NO: 202 - DNA, 401 bp, Homo sapiens
tcccaatgccattcccaactcttctaaattcatctggggcttaatagactctccccatcccaactcttctaaattcatctggggcttaatagactttccccctcatagacttccatgataagctgctctgtttcacaatagggaagcttacacaggcctttccttcaatctcatcctgccctccctagctaacagaaattyctagaaatatctagccagtgagagcatccatttctagtttcatcctataatgttggttttcataatgttggttttaaatgtaattattcattacaaagtatttgtgagggagtagagaagaatgggtacttataataaaagcatgactttttaatgtatcaaaactatacagaaacaaagacaacatagagataactctt

SEQ ID NO: 203 - DNA, 401 bp, Homo sapiens
tactgtctgattaaaaataatatgacacatgacaggtacaagttacatgagaattcctttgacatgtgaatgaatggttctttgaagacagagtgcagtaaattccagtctataaaagagttttttgaataatatgatgaccaaacttgtgtgtccagggcaaaaggagggtacaaatagacagaatatgcaagatagagwaatgctggagttaagtctcagatatctttgaagcaagagtttcatccttaatttgcttggtgggcatgtgtttcttacatataagatttttatgtttctgaagcccagaggataagatggagaattcagctcagggttggcctaagggagggaggtgaactagcgagaaagaaaaaggtcccataagacaccccaggaag

SEQ ID NO: 204 - DNA, 401 bp, Homo sapiens
tgcaggaagaatctgttggctggttacaattttatattaagggagggtacccaagagaaaattctagcccatttctattgcttcatttttcacattgcatgcagtcagtggtgatgtactttctctctctctttttttagagagagagttcctttttttttttttttagagagttcctcattacttgttttgaacctaaasttataatttagtgtctgtgacagcacatttgattgtttttaaatgaaggtgataggaaaggcagaagaatgactagggaagaaaatctggagaacagatgacaagataacattgcttttgattctctgcaaacaagcatggtattgaaaaatgatccaaaatcgtttgcttgagcaccacagttacttttgagtaatatt

SEQ ID NO: 205 - DNA, 401 bp, Homo sapiens
gaccatcctggctaacacggtgaaaccccgtctctactaaaaatacaaaaattagccgggcatggtggtgggcgcctgtagtcccagctactctggaggctgagacaggagaatggtgcgaacccgggaggtggagcttgcagtgagccgagatcgcgccactgcactccagcctgggcgacagagcgagactcactctcmaaaaaaaaaaaaaaaaaaaaaaaaaaaggaaccaagttgtgagtgagaaggacctggaaaggcactgttagtggcagtggatccgtaggggtctgcaggaacctcaactcttgcgtcctcagaagaattcgacggaggaggcatgaggcagaaggagagacagaggcaagttttatagcagaagtgaaagtttatttaaa

SEQ ID NO: 206 - DNA, 401 bp, Homo sapiens
gaagagggccaagcaggtgacttgagagaccaagtgcgctgtttgaccttgacttacggtttagtatattggcatacttctggggtcttgtgtccctgatttcctgatttttccctggagggtgcgccgtctgtatgcgcagtggcctactagcgtttgggagaggccgtaggcgcagtgtgtttactggagttgtacgcrtgctccctagagtggttcttcccttcccggtctagcattcctaggggaaagtgatgtaccagttaagctctgctgttttgcctcttagtgctcatgcttgagcccactcgcccaattcctgaaatcttagggggaagcggctgatcaccagtttcagatttttcctatgtattgtgagactgcctttccctggcacaggc

SEQ ID NO: 207 - DNA, 401 bp, Homo sapiens
ctgcctcccataatgccagagtggtcaatttttagtatccttactgtgcaaccagctctcatgattgtacccagtcaaatctctataataaattatacatctctctacagacctggactgaaacattgctatttggtgttttaccctatttagagccaaaatatattttcataagaagaaactcacagctgtcacatgtawgtaagttataaactgatttcagaatctccaatacagaaaatagtaactttagtgttcctattgtttggtactctaataataattagagaaaactgagagtttgggattatgtgactacaggaaatacctgtaattgccaattggcttcataataagaaaattggcagggctaagaaggcccagggaattaagaatataaa

SEQ ID NO: 208 - DNA, 401 bp, Homo sapiens
aaggcttctggccccctccaatcccctctgcatctcactaacaggactggaagctgctgaaacagaggtattggaagcccacagatcatcaatatacagtttgaacttgtagtgaggtagacaagaataattcatagggatgtattatagagtaggtagagaaggctgactcctgacagtggcatatttgataaaaatccycccaaaggcatttagtacctggtaggctaatggctcatgagagaaaacacaagaaaggagatgatatgggagggtgggaaagccaatctttaggtaaaaaattacaagtcgtctttaaactatttactttaaaaattactagtttttctgctctgcatgctaatatgctactctttttttctcaactttattatttctct

SEQ ID NO: 209 - DNA, 401 bp, Homo sapiens
aattacaagtcgtctttaaactatttactttaaaaattactagtttttctgctctgcatgctaatatgctactctttttttctcaactttattatttctctttgaatgtatattagtccattcttacattgctataaagaaatatcggagactaggtaatttataaagaaaagaggtttaattgcctcatggtttcatagrctgtttgggtagcatggctggggaggcctcaggaaacttttaatcatggtggaaagtgaaggggaagtagggacgtcttacatgaccagagcaggaggaagagagagaagggggagatggtgcacacttttttttttttaagctttgtatctaatttggcaatcttattccagtatttttctttttctttttttttttat

SEQ ID NO: 210 - DNA, 401 bp, Homo sapiens
acatttgggttggttccaagtcttcgctattgtgaatagtgccgcaataaacatacgtgtgcatgtgtctttatagcagcatgacttctaatcctttgggtatatacccagtaatgggatggctgggtcaaatgatatttctagttctagatccctgaggaatcgccacactgtcttctacaatggttgaactagtttacygtctcaccaacagtgtaaaagtgttcctatttctctacatcatctccagcacctgttgtttcctgactttttaatgatygccattctaactggtgtgagatggtatctsattgtggttttgatttgcatttctcggatggccagtgatgatgagcattttttcatgtgtctgttggctgcataaatgtcttcttttgaga

SEQ ID NO: 211 - DNA, 401 bp, Homo sapiens
catgacttctaatcctttgggtatatacccagtaatgggatggctgggtcaaatgatatttctagttctagatccctgaggaatcgccacactgtcttctacaatggttgaactagtttacygtctcaccaacagtgtaaaagtgttcctatttctctacatcatctccagcacctgttgtttcctgactttttaatgatygccattctaactggtgtgagatggtatctsattgtggttttgatttgcatttctcggatggccagtgatgatgagcattttttcatgtgtctgttggctgcataaatgtcttcttttgagaagtgtctgttcatatccttcgyccactttttgatggggttgtttgtttttttcttgtaaatttgtttgagttctttgta

SEQ ID NO: 212 - DNA, 401 bp, Homo sapiens
agtaatgggatggctgggtcaaatgatatttctagttctagatccctgaggaatcgccacactgtcttctacaatggttgaactagtttacygtctcaccaacagtgtaaaagtgttcctatttctctacatcatctccagcacctgttgtttcctgactttttaatgatygccattctaactggtgtgagatggtatctsattgtggttttgatttgcatttctcggatggccagtgatgatgagcattttttcatgtgtctgttggctgcataaatgtcttcttttgagaagtgtctgttcatatccttcgyccactttttgatggggttgtttgtttttttcttgtaaatttgtttgagttctttgtagattttggatattagccctttgtcagataa

SEQ ID NO: 213 - DNA, 401 bp, Homo sapiens
tgttcctatttctctacatcatctccagcacctgttgtttcctgactttttaatgatygccattctaactggtgtgagatggtatctsattgtggttttgatttgcatttctcggatggccagtgatgatgagcattttttcatgtgtctgttggctgcataaatgtcttcttttgagaagtgtctgttcatatccttcgyccactttttgatggggttgtttgtttttttcttgtaaatttgtttgagttctttgtagattttggatattagccctttgtcagataagtagattgcaaaaattttctcccattctgtaggttgtctgttcactctgatggtagtttcttttgccgtgcagaagccctttagtttaattagatctcatttgtcaattttgg

SEQ ID NO: 214 - DNA, 401 bp, Homo sapiens
tgtagattttggatattagccctttgtcagataagtagattgcaaaaattttctcccattctgtaggttgtctgttcactctgatggtagtttcttttgccgtgcagaagccctttagtttaattagatctcatttgtcaattttggcttttgttgccattgcttttggtgttttagacatgaagtccttgaccatgcctrtgtcctgaatggtattgcctaggttttctcctagggtttttatggttttaggtctaacatgtaagtctttaatccatcttgaattaatttttgtgtaaggtataaggaagggatccagtttcagctttctacatatggctagccagttttcccagcaccatttgttaaatagggaattgtttccccatttcttgtttttg

SEQ ID NO: 215 - DNA, 401 bp, Homo sapiens
tttgtgtaaggtataaggaagggatccagtttcagctttctacatatggctagccagttttcccagcaccatttgttaaatagggaattgtttccccatttcttgtttttgtcaggattgtcaaagatcagatggttgtagatgtgtggtattatttctgagggctctgttctgttccattggtgtatatctctgttttgktaccastacyatgctgttttggttactgtagccttgtagtatagtttgaagtcaggtagtgtgatgcctccagctttgttcttttggcttaggattgtcttggcaatgtgagctcttttcagattccatatgaactttaaagtagttttttccaattctgtgaagcaagtcattggtagyttgatggggatgtcattgaa

SEQ ID NO: 216 - DNA, 401 bp, Homo sapiens
taaggtataaggaagggatccagtttcagctttctacatatggctagccagttttcccagcaccatttgttaaatagggaattgtttccccatttcttgtttttgtcaggattgtcaaagatcagatggttgtagatgtgtggtattatttctgagggctctgttctgttccattggtgtatatctctgttttgktaccastacyatgctgttttggttactgtagccttgtagtatagtttgaagtcaggtagtgtgatgcctccagctttgttcttttggcttaggattgtcttggcaatgtgagctcttttcagattccatatgaactttaaagtagttttttccaattctgtgaagcaagtcattggtagyttgatggggatgtcattgaatctata

SEQ ID NO: 217 - DNA, 401 bp, Homo sapiens
gtataaggaagggatccagtttcagctttctacatatggctagccagttttcccagcaccatttgttaaatagggaattgtttccccatttcttgtttttgtcaggattgtcaaagatcagatggttgtagatgtgtggtattatttctgagggctctgttctgttccattggtgtatatctctgttttgktaccastacyatgctgttttggttactgtagccttgtagtatagtttgaagtcaggtagtgtgatgcctccagctttgttcttttggcttaggattgtcttggcaatgtgagctcttttcagattccatatgaactttaaagtagttttttccaattctgtgaagcaagtcattggtagyttgatggggatgtcattgaatctataaatt

SEQ ID NO: 218 - DNA, 401 bp, Homo sapiens
tggtgtatatctctgttttgktaccastacyatgctgttttggttactgtagccttgtagtatagtttgaagtcaggtagtgtgatgcctccagctttgttcttttggcttaggattgtcttggcaatgtgagctcttttcagattccatatgaactttaaagtagttttttccaattctgtgaagcaagtcattggtagyttgatggggatgtcattgaatctataaattaccttgggcagtaaggccattttcatgatattgattcttcctacccatgagcatggaattttcttccattcgtttgtatcctcttttatttcattgagcagtggtttgtagttcttgaagaggtccttcacatcccttgtaaattggattcctaggtattttattctctt

SEQ ID NO: 219 - DNA, 401 bp, Homo sapiens
atatacaatcatgtcatctgcaaacagggacaatttgacttcctcttttcctaactgaataacctttatttctttctcctgcctgttattatgttgaataggagtggtgagggagggcatccctgtgttgtgccagttttcaaagggaatgctttgagtttttgtccattcagtatgatattggctgtgggtttgtcataratagctcttgtttttttgagatacaccccatcaatacctaatttattgaragtttttagcatgaagggctgttgaattttgtcaaagggcttttcttcatctattgagataatcatgtggtttttgtctttggttctgtttgtatgctggattacatttattgatttgcatatgttgaaccatcctcgcatcccaaggat

SEQ ID NO: 220 - DNA, 401 bp, Homo sapiens
ctaactgaataacctttatttctttctcctgcctgttattatgttgaataggagtggtgagggagggcatccctgtgttgtgccagttttcaaagggaatgctttgagtttttgtccattcagtatgatattggctgtgggtttgtcataratagctcttgtttttttgagatacaccccatcaatacctaatttattgaragtttttagcatgaagggctgttgaattttgtcaaagggcttttcttcatctattgagataatcatgtggtttttgtctttggttctgtttgtatgctggattacatttattgatttgcatatgttgaaccatcctcgcatcccaaggatgaagcccaggtgatcatggtggataagctttttgatgtgctgctggatta

SEQ ID NO: 221 - DNA, 401 bp, Homo sapiens
tggacttcttttggttggtaggctattaattattgccttaatttcagagcctgttattgatctattcagggattcaacttcttcctggtttagttttgggagggtgtatgtgtccaggaatttttccatttcttctagattttctagtttatttacatagaagtgtttatagtattctctgatggtagtttgtatttctgygggattggtggtgatatcccctttatcattttttattgagtccatttgattcttctctcttttcttctttattattcttgctagctgtctatcaattttgttgatcttttcaaaaaaccagctgctggattcattgattttttgaagggttttttttgtatctgtatttccttcagttcttctctgatcttagttatttc

SEQ ID NO: 222 - DNA, 401 bp, Homo sapiens
tctttattattcttgctagctgtctatcaattttgttgatcttttcaaaaaaccagctgctggattcattgattttttgaagggttttttttgtatctgtatttccttcagttcttctctgatcttagttatttcttgccgtctgctagcttttgaatgtgtgttctcttgcttctctagttcttttaattgtgatgttasggtgtcaattttagatctttcctgctttctcttgtgggcatttagtgttataaatttccctctacactgctttaaatgtgtcccatttaaaggtgatttggggtggagagttctttagatgtctattaggtccacttggtgcagagctgagttcaactcctggatatccttgttaactttctgtctcgttgatctgtcta

SEQ ID NO: 223 - DNA, 401 bp, Homo sapiens
tttaaaggtgatttggggtggagagttctttagatgtctattaggtccacttggtgcagagctgagttcaactcctggatatccttgttaactttctgtctcgttgatctgtctaatgttgacagtggggtgttaaattctctcattattattgtgtgggagtctaagtctctttgtaggtctctaaggacttgctttatrtatctgggtgctcctgtattgggtgcatatatatttaagatagttagctcttcttgttgaattgatccctttaccattatgtaatgaccttctttgtctcttttgatctttattggtttaaagtctgttttatcagagactaggattgcaacccctgcctttttttgttttccatttgcttggttgatcttcctccatcc

SEQ ID NO: 224 - DNA, 401 bp, Homo sapiens
tagcatcagtggtctttacaatttgtcatgtttttgcagtcgctggtaccagttgttcctttccatgtttagtgcttccttcaggagctcttttagggcaggcctggtggtgacaaaatctctcagcatttgcttctctgtaaagaattctgtttctccttcacttatgaagcttagtttggctggatatgaaattctggkttgaaaattcttttctttaagaatgttgaatattggccccactctcttctggcttctagagtttctgccaagagatctactgttagtctgaagggtttccctttgtgggcaacccgacctttctctctggctgcccttaacattttttccttcatttcaactttggtgaatctgacaattacgtttcttggagttgctct

SEQ ID NO: 225 - DNA, 401 bp, Homo sapiens
gccaagagatctactgttagtctgaagggtttccctttgtgggcaacccgacctttctctctggctgcccttaacattttttccttcatttcaactttggtgaatctgacaattacgtttcttggagttgctcttctcaaggagtatctttgtggcgttctctgtatttcctgaatttgaatgttggcctgccttgctagkttggggaagttctcctggataataccctgcagagtgttttccaacttggttccattctccccatcactttcaggtacaccaatcagatgtagatttggtcttttcacatagtcccatatttcttgaaggctttgtttgtttctttttactcttttttctctagacttctcttctcacttcatttcattcatttgatcctc

SEQ ID NO: 226 - DNA, 401 bp, Homo sapiens
cagttgatcgaatcagctactgaagcttgtgcattcattacatagttctcatgccatgtttttcagctccatcacgtcatttaaggactcctctacattggttattctagttagccattcgtctaatcttttttcaaggtttttagctttttttgcaatgcgttctaacttcctcctttagcttggagaagtttgatcttytgaagccttcttctttcaactcgtcaaagtcattctccatccagctttgttccattgctggtgaggaactgtgttcctttggagagggagaggcgctctgatttttagaattttcagcgtttctgctctgttttttccccatctttgtggttttatctacctttggtctttgatgatggtgacgtacagatggggttttg

SEQ ID NO: 227 - DNA, 401 bp, Homo sapiens
tggtgacgtacagatggggttttggtgtggatgtcctttctgtttcttagttttccttctaacagttagggtcctcagctgcaggtctgttggagtttactggaggtccactccagaccctgtttgcctggatatcagcagtggaggctgcagaacagtgaatattgctgaacagcaaatgttgctgcttgattgttcctytggaagcttcatctcagaggggtacctggctgtgtgaggtgtcagtctgcccctactggggagtgtctcccagttaggctactcagggttcagggacccacttgaggaggcagtctgtctgttctcagatctcaaactccattctgggagaaccactactctcttcaaagctgtcagacagggacatttaagtctgcaga

SEQ ID NO: 228 - DNA, 401 bp, Homo sapiens
actcagggttcagggacccacttgaggaggcagtctgtctgttctcagatctcaaactccattctgggagaaccactactctcttcaaagctgtcagacagggacatttaagtctgcagaggtttctgctgccttttgtttggctgtgccctgcccccagaggtggcatctacagaggcaggcaggcctccttgagctgcrgtgagctccacccagttcgagcttcctggctgctttgtttacctgctcaagcctcagcaatggtgggcgccccacccccagcctcactgyagccttgcagtttgatctcagactgctgtgctagcaatgaagggggctccgtgggcatgggaccctctgagccatgtgtgggatataatctcctggtgtgccgtttgcta

SEQ ID NO: 229 - DNA, 400 bp, Homo sapiens
ctgtcagacagggacatttaagtctgcagaggtttctgctgccttttgtttggctgtgccctgcccccagaggtggcatctacagaggcaggcaggcctccttgagctgcrgtgagctccacccagttcgagcttcctggctgctttgtttacctgctcaagcctcagcaatggtgggcgccccacccccagcctcactgyagccttgcagtttgatctcagactgctgtgctagcaatgaagggggctccgtgggcatgggaccctctgagccatgtgtgggatataatctcctggtgtgccgtttgctaagaccgttggaaaagggcaatattagtgagaggtgacagcatgctggcagccctcacagccctcgctygctctcagcacctcctctgcc

SEQ ID NO: 230 - DNA, 401 bp, Homo sapiens
cgccccacccccagcctcactgyagccttgcagtttgatctcagactgctgtgctagcaatgaagggggctccgtgggcatgggaccctctgagccatgtgtgggatataatctcctggtgtgccgtttgctaagaccgttggaaaagggcaatattagtgagaggtgacagcatgctggcagccctcacagccctcgctygctctcagcacctcctctgcckgggctcccactttggcagcacttgaggagcccttcagcccaccgctgcactgtgggagcccctttctgggctggccaaggctggagccggctccctcagcttgcagggaggtgtggaaggagaggtgcgagcggcaaccagggctgcacagggtgcttacgggccagctggagttctg

SEQ ID NO: 231 - DNA, 401 bp, Homo sapiens
yagccttgcagtttgatctcagactgctgtgctagcaatgaagggggctccgtgggcatgggaccctctgagccatgtgtgggatataatctcctggtgtgccgtttgctaagaccgttggaaaagggcaatattagtgagaggtgacagcatgctggcagccctcacagccctcgctygctctcagcacctcctctgcckgggctcccactttggcagcacttgaggagcccttcagcccaccgctgcactgtgggagcccctttctgggctggccaaggctggagccggctccctcagcttgcagggaggtgtggaaggagaggtgcgagcggcaaccagggctgcacagggtgcttacgggccagctggagttctgggtgggcatgggcttggtgggc

SEQ ID NO: 232 - DNA, 401 bp, Homo sapiens
ccctgccagagggccctctcagagtggccacctggccctgccagccctggggaatgaggagcttagcacccggaccagcggctgcgcagggtgtgctgggtcccccagcagtgccagcccaccagtgctgtgctcgatttctctccaggccttagctgccttcctgtggggcagggctcgggacctgcagcccgccatgcytgagtcccgcccccacccccacgggstcctgtgcagcctgagcctccccgacgagcgctgcccactgctccatggtgcccagtcccatcgaccacccaagggctgaggagtgtgggcgcacagcacaggactggcaggcagctccaccagcagccccagtgcgagatccactgggtgaggccagctgggctcctgtgtct

SEQ ID NO: 233 - DNA, 401 bp, Homo sapiens
gccacctggccctgccagccctggggaatgaggagcttagcacccggaccagcggctgcgcagggtgtgctgggtcccccagcagtgccagcccaccagtgctgtgctcgatttctctccaggccttagctgccttcctgtggggcagggctcgggacctgcagcccgccatgcytgagtcccgcccccacccccacgggstcctgtgcagcctgagcctccccgacgagcgctgcccactgctccatggtgcccagtcccatcgaccacccaagggctgaggagtgtgggcgcacagcacaggactggcaggcagctccaccagcagccccagtgcgagatccactgggtgaggccagctgggctcctgtgtctagtgggaacttggaraacctttatgt

SEQ ID NO: 234 - DNA, 401 bp, Homo sapiens
acccccacgggstcctgtgcagcctgagcctccccgacgagcgctgcccactgctccatggtgcccagtcccatcgaccacccaagggctgaggagtgtgggcgcacagcacaggactggcaggcagctccaccagcagccccagtgcgagatccactgggtgaggccagctgggctcctgtgtctagtgggaacttggaraacctttatgtctagctaagggattgtaaatacaccaatcagcactctgtctctagctcaaggtttgtaaacacaccaatcagcaccctgtgtctagctcaggttttgtgaatacaccaatcgacactctgtgtctagctactctggtggggacttggaaaacttttatgtctagctaagagattgtaaataacaccaat

SEQ ID NO: 235 - DNA, 401 bp, Homo sapiens
caccaatcgacactctgtatctagctactctggtggggacttggagaacctttgtgtccagctcagggattttaaacacaccaatcagcaccctgtcaaaacagaccactcggctctctgtaaaatggaccaatcagcaggatgtgggtggggccagataagagaataaaagcaggctgcccgagccagcagtggcaaccrgctggggtccccttccacactgtggaarctttgttctttcgctctttgaaataaatcttgctgctgctcaatctttgggtacacactgcctttatgagctgtaacactcactgtgaaggtctgcagcttcactcctgaagccagcaagaccatgaacccaccgggaggaatgaacaactccagacgcgccaccttaagac

SEQ ID NO: 236 - DNA, 401 bp, Homo sapiens
tctggtggggacttggagaacctttgtgtccagctcagggattttaaacacaccaatcagcaccctgtcaaaacagaccactcggctctctgtaaaatggaccaatcagcaggatgtgggtggggccagataagagaataaaagcaggctgcccgagccagcagtggcaaccrgctggggtccccttccacactgtggaarctttgttctttcgctctttgaaataaatcttgctgctgctcaatctttgggtacacactgcctttatgagctgtaacactcactgtgaaggtctgcagcttcactcctgaagccagcaagaccatgaacccaccgggaggaatgaacaactccagacgcgccaccttaagacccgtaacactcaccgcaaaggtctgcag

SEQ ID NO: 237 - DNA, 401 bp, Homo sapiens
cccgattttccaggtgctgtctgtcacccttttccttggctaggaaagggaattccctgaccccttgtgcttcccgggtgaggcaatgcctcgccctgctttggctcacacttggtgtgctgcacccactgttctgcccccactgactgacgagccccagtgagatgaacccagcaccttagttggaaatgcagaaatcaycygtcttctgcgttgctcacactgggagctgtagactggagctgtttytatttggccatcttggaaccaccttcccaatagtacacatttttaaacaaccagatctcatgagaactcactcactatcatgagaacagcaagggggaaatcagcccccatgatctagtcacctcccaacaggtccctcctccaacattggg

SEQ ID NO: 238 - DNA, 401 bp, Homo sapiens
cgattttccaggtgctgtctgtcacccttttccttggctaggaaagggaattccctgaccccttgtgcttcccgggtgaggcaatgcctcgccctgctttggctcacacttggtgtgctgcacccactgttctgcccccactgactgacgagccccagtgagatgaacccagcaccttagttggaaatgcagaaatcaycygtcttctgcgttgctcacactgggagctgtagactggagctgtttytatttggccatcttggaaccaccttcccaatagtacacatttttaaacaaccagatctcatgagaactcactcactatcatgagaacagcaagggggaaatcagcccccatgatctagtcacctcccaacaggtccctcctccaacattgggga

SEQ ID NO: 239 - DNA, 401 bp, Homo sapiens
ggaattccctgaccccttgtgcttcccgggtgaggcaatgcctcgccctgctttggctcacacttggtgtgctgcacccactgttctgcccccactgactgacgagccccagtgagatgaacccagcaccttagttggaaatgcagaaatcaycygtcttctgcgttgctcacactgggagctgtagactggagctgtttytatttggccatcttggaaccaccttcccaatagtacacatttttaaacaaccagatctcatgagaactcactcactatcatgagaacagcaagggggaaatcagcccccatgatctagtcacctcccaacaggtccctcctccaacattggggattataatttgacatgaaatattggtggggacacaaatccaaaccat

SEQ ID NO: 240 - DNA, 401 bp, Homo sapiens
ttagagtttttattttattaaaggctttaattggtaatactcatttctttttcttttattagcattgattttactttctgtagaaatacagaaagcattttcaaatgctaattttattatgtctgtatctggtagaagattcaaaacattgctccaaaaacacttggcagcaaattccccattcactggcaacctgaaatrtaagtttattgagcatgaatgataattcgttatcagatgtaagtcttggctctaattacaagatgcttgtagtccaacatgtagtctaacaccttatactctgatcaagtataagaaagaggccaatttactagtagaaattgcaacaatgaataggaaaaaaaatgtacgctgcaaagcagagcactgtgagagaagaa

SEQ ID NO: 241 - DNA, 401 bp, Homo sapiens
atagttctgtatagggaagtgtgaatgctgtacatagcatgtgactagcttgcatttaatggggaaaagaatttaactagataattagtatatatcaaatgcaatttatgtgtcagacatcatgctatttatgtattttacacaattattatcaaaatgtaatacattaccaatgactagaaataatagttgaagaataakaatagtttcataaaaagtgtaggataattgaatcagagagagacattcagagaagaaaaacgttatgaaaaattttaagtagtagtttgaaggaagaaaaaagagttttccaaaaagaaaatgtctggaaatataaagyaattcaaaatttgagaagcagaggttttgctttagtaaggagagggtaaatagatatggct

SEQ ID NO: 242 - DNA, 401 bp, Homo sapiens
acacaattattatcaaaatgtaatacattaccaatgactagaaataatagttgaagaataakaatagtttcataaaaagtgtaggataattgaatcagagagagacattcagagaagaaaaacgttatgaaaaattttaagtagtagtttgaaggaagaaaaaagagttttccaaaaagaaaatgtctggaaatataaagyaattcaaaatttgagaagcagaggttttgctttagtaaggagagggtaaatagatatggctggtagagtgtaractgtgaccagagcagcgattctcttggcttataagaggaaactgctgggtaatcccaaagggccttgaattgttgatgaaatgtaagttctttgtggagttaattttggtcaaacattgaccaaaa

SEQ ID NO: 243 - DNA, 401 bp, Homo sapiens
aaaaagtgtaggataattgaatcagagagagacattcagagaagaaaaacgttatgaaaaattttaagtagtagtttgaaggaagaaaaaagagttttccaaaaagaaaatgtctggaaatataaagyaattcaaaatttgagaagcagaggttttgctttagtaaggagagggtaaatagatatggctggtagagtgtaractgtgaccagagcagcgattctcttggcttataagaggaaactgctgggtaatcccaaagggccttgaattgttgatgaaatgtaagttctttgtggagttaattttggtcaaacattgaccaaaatgtttataaatttccttttttcgtggtaaaataaaattgtcttatgattgcttcttgagtgaatttttaagga

SEQ ID NO: 244 - DNA, 401 bp, Homo sapiens
gagtgaatttttaaggatattaaaagttggtattccttaaaagttaaccttttacggttaataaactattgctatagtttattatggtctttgattcatttttctactaggttacttgagactgctacacaacatcaaaaaaattctaatgcacatgggcacaggtttattgtttgaattcccataaaaatttaaaacatsactgaaatggcaaagttgatttaacattaaatgtaacatatcacattaaaaatagaagatactaaagaaaaaatatacaaatattgtagtagatggaggaaaacttctctatgcattratgataaaaattatcaggaagttcagagtagaaggaaaagttttcaacctgaaaaaccatttttactaaaagcctacagcaa

SEQ ID NO: 245 - DNA, 401 bp, Homo sapiens
agactgctacacaacatcaaaaaaattctaatgcacatgggcacaggtttattgtttgaattcccataaaaatttaaaacatsactgaaatggcaaagttgatttaacattaaatgtaacatatcacattaaaaatagaagatactaaagaaaaaatatacaaatattgtagtagatggaggaaaacttctctatgcattratgataaaaattatcaggaagttcagagtagaaggaaaagttttcaacctgaaaaaccatttttactaaaagcctacagcaaacatcatgcttgaagattaaatagtagaaacactccttttaaaatgaaacatgacagacatgcatatgtttttattttttgcttttttctctctttttcttgctctcccagtcttcct

SEQ ID NO: 246 - DNA, 401 bp, Homo sapiens
acaatagcataaaggtccaaattctttccaaattgatatatagtctaatgcaatttaataaaaatcccaaacactaatttttatgagattagacaagctgattctaatatatacatggaagaacaaacggccaagaatagccaacatatgcttaaagaaacaaaatcaaggggcttataataatgctgctataattaagartggatgattatgtagatcaatggaatagaacagaaagttcagaaattgacatgttaatttagggaaattaaatattttgaaaaggtagcattgaatattagtgagcaaataattcttttattaagtcacctggtacaatgattatttatatagaaaatttataattggatctctacttcacatcatatatgaaattcaat

SEQ ID NO: 247 - DNA, 401 bp, Homo sapiens
ttataaaaaagtaacagctttgagatataattcatataccatcatacatttcctttaaaatgtataatttaatggtttttagtatatttacaattatgtaactgatagactctttgtgttccttagctcagctaggtctgagttcttgtcaaatgaccaggaagaattaggcacgtggacaccagagagtgagtggagtarrattaattaagcgaaatgaaaactctcagtggagagtgtatgtggggaagggggtggttcccctacctgaaggtgggaaggccccccaacctgccgccccatgtggctgggtctggggtcttttatggactcagaatggagagtgcatgctgattggtttgtgagtatgcaaaaaaggttaaaacaaagacaccactcag

SEQ ID NO: 248 - DNA, 401 bp, Homo sapiens
tataaaaaagtaacagctttgagatataattcatataccatcatacatttcctttaaaatgtataatttaatggtttttagtatatttacaattatgtaactgatagactctttgtgttccttagctcagctaggtctgagttcttgtcaaatgaccaggaagaattaggcacgtggacaccagagagtgagtggagtarrattaattaagcgaaatgaaaactctcagtggagagtgtatgtggggaagggggtggttcccctacctgaaggtgggaaggccccccaacctgccgccccatgtggctgggtctggggtcttttatggactcagaatggagagtgcatgctgattggtttgtgagtatgcaaaaaaggttaaaacaaagacaccactcaga

SEQ ID NO: 249 - DNA, 401 bp, Homo sapiens
ttgctgaataatattccattgtatggatataacacgtttcttttccattcatcacttgatatttaatggtttccactttttgtctgttaggaacagtgctgtaatatacattcatgtaccaagtttttatgtggacatatattaataatttcatttctgctgggtatgtaactaggagtagaattgctgcatcataaagtwattctatatttaatctgagggactgttagacctgttttccagagtgatgatacyattttatattcccacaagtgtccycatggatacttgttattatctgtttcttaaattatggccatcctagtagatgtgaagtggtatctcattgtgattttctttggcatttctctagtgtctaaggatgatgagaaagttttcat

SEQ ID NO: 250 - DNA, 401 bp, Homo sapiens
cttgatatttaatggtttccactttttgtctgttaggaacagtgctgtaatatacattcatgtaccaagtttttatgtggacatatattaataatttcatttctgctgggtatgtaactaggagtagaattgctgcatcataaagtwattctatatttaatctgagggactgttagacctgttttccagagtgatgatacyattttatattcccacaagtgtccycatggatacttgttattatctgtttcttaaattatggccatcctagtagatgtgaagtggtatctcattgtgattttctttggcatttctctagtgtctaaggatgatgagaaagttttcatgagtttaatggccatttgaatattgtctttggtgaaatatacattggttttaaa

SEQ ID NO: 251 - DNA, 401 bp, Homo sapiens
tttgtctgttaggaacagtgctgtaatatacattcatgtaccaagtttttatgtggacatatattaataatttcatttctgctgggtatgtaactaggagtagaattgctgcatcataaagtwattctatatttaatctgagggactgttagacctgttttccagagtgatgatacyattttatattcccacaagtgtccycatggatacttgttattatctgtttcttaaattatggccatcctagtagatgtgaagtggtatctcattgtgattttctttggcatttctctagtgtctaaggatgatgagaaagttttcatgagtttaatggccatttgaatattgtctttggtgaaatatacattggttttaaataaacattgcttcataataacaca

SEQ ID NO: 252 - DNA, 401 bp, Homo sapiens
aagtggtatctcattgtgattttctttggcatttctctagtgtctaaggatgatgagaaagttttcatgagtttaatggccatttgaatattgtctttggtgaaatatacattggttttaaataaacattgcttcataataacacaactttaaagataaacagaatgaggagaaaatagaaaaaaagttaatgtagataaytctttagataagctttgctgtgaatagaagcagtgaaaggagataattcaaaggacatgtgagttgaagaaaggcttgcaaatgttccggttcagcaatttcttttatgccacagtgataatagtagcccacagtcacagtctcagtgggcacagagtgagggaggcaaagtgagggacagaaatggggaaggaagagga

SEQ ID NO: 253 - DNA, 401 bp, Homo sapiens
gggcagaagaaaagcactcaggccattggataggcagactttttcccttgagaatccatgactcttgtcaccctttgcttccctctctacccagggactttactgctttacaacctaaggaaccagctaaaacaacagcaacaacgataacaacaaacccaattctcacccgccgcacctgcccccaccacccgcaaaaarcaaatccaaacaaaaaactatttaaaaatcacacaattcacaaaaagcgtctcaagagtatgttaatgtaaataccatttgtattaaacccttaccttatttaaacgtacacatagrgcttgactttaagaaacccatgcatgaattatttgaataactgaactaatgaagggtgaaattaaaataaatatattcaaata

SEQ ID NO: 254 - DNA, 401 bp, Homo sapiens
aggaaccagctaaaacaacagcaacaacgataacaacaaacccaattctcacccgccgcacctgcccccaccacccgcaaaaarcaaatccaaacaaaaaactatttaaaaatcacacaattcacaaaaagcgtctcaagagtatgttaatgtaaataccatttgtattaaacccttaccttatttaaacgtacacatagrgcttgactttaagaaacccatgcatgaattatttgaataactgaactaatgaagggtgaaattaaaataaatatattcaaataatgagaggyggtataagtgaagggaaatatggtttaaattctgagtcttataaaaataatatgtatgtacatgtagtacaactattaaaatttgggctattcttgtttcttaatatt

SEQ ID NO: 255 - DNA, 401 bp, Homo sapiens
aacaaaaaactatttaaaaatcacacaattcacaaaaagcgtctcaagagtatgttaatgtaaataccatttgtattaaacccttaccttatttaaacgtacacatagrgcttgactttaagaaacccatgcatgaattatttgaataactgaactaatgaagggtgaaattaaaataaatatattcaaataatgagaggyggtataagtgaagggaaatatggtttaaattctgagtcttataaaaataatatgtatgtacatgtagtacaactattaaaatttgggctattcttgtttcttaatatttttgtgtataatgataaaaaacaataaaagaaataaagctatttgatttggatgtacagagaaaaatccaagctatgggaagtacattgtga

SEQ ID NO: 256 - DNA, 401 bp, Homo sapiens
agctattgccttaattttagccccacccatgtacactctgtgacgctgcctgggattctacaaatcacatttatcttttgccactaagctccctgttaggatctgccaatcagaggacgctaggggcggactggaaggctgagtggggaagaaggaagacacttcctgtttgcttcctgttctgtttaacgacaccctaasgattacttttcatttcagcagttatagtttgtttcagtagcaacagttatttccagttttagttttgacagcattcctagaactagctccttagggttttttaaagacaccaacgccaaccagcaagcgccccctactgagcggtctaggtcccagctctgagaagccactcaagtttctaagtttagtatttatattat

SEQ ID NO: 257 - DNA, 401 bp, Homo sapiens
atatgtatatatagatatgtgtctctatatcaatgtatgtattatagatatatacatatatgtatatatagaaccatagataattctccttaatatgcatgtacatagatatgtacatccatattatatgatatagaatatataaatataatatctaatatatgcatattaaggagaattatctatggttctaaatatgcrttatacatatctatatgcatactgtatatcatataatacatatccatgtacatgcatattaaggagaactatttacggtttttggtctcatttgtaatgctcataaaaattttctcttttaattttaatttcattgaaaccatccttggactcatacttggagacaaacttacttggtcactatatattattattttgac

SEQ ID NO: 258 - DNA, 401 bp, Homo sapiens
aataatttgtataaattggaattatttgtttcttaaaggtttatggaacatctaaagaacaaattcatctggctctcatacagtttttaggatactactttgattgacatttcagtttcttttagatctatatcttctatttttcttgaggctattttgataattatttcttaagatattatcaattttcatctagataawaaaatatatcattttatgtatttttaaattcatcgatatttccacttttcattgacaacattattaagttttattgtgtctcttttttcaaattatacttgatgaaattttgaaaatgattggtctttccaaaaatcacctttaggttttattgataaactttttcttattttctaagtcaggatacaaaatcagtgtac

SEQ ID NO: 259 - DNA, 401 bp, Homo sapiens
aaaaactactttaaagttcatatggaaccaaaaaagagcccgcatcaccaaggcaatcctaagccaaaagaacaaagctggaggcatcacactacctgacttcaaactatactacaaggctgtagtaaccaaaacagcatggtactggtaccaaaacagagatatagaccaatggaacagaacagagccctcagaaataaygccgcatatctacaactatctgatctttgacaaacctgagaaaaacaagcaatggggaaaggattccctatttaataaatggtgctgggaaaactggctagccatatgtagaaagctgaaactggatcccttccttacaccttatacaaaaatcaattcaagatggattaaagacttaaacgttagacctaaaaccataa

SEQ ID NO: 260 - DNA, 401 bp, Homo sapiens
tggatcccttccttacaccttatacaaaaatcaattcaagatggattaaagacttaaacgttagacctaaaaccataaaaaccctagaagaaaacctaggcatcaccattcaggacataggcatgggcaaggacttcatgtccaaaacaccaaaaggaatggcaacaaaagccaaaattgaccactgggatctaattaaaytaaagagctgcacagcaaaagaaactaccatcagagtgaacaggcaacctacaaaatgggagaaaattttcgcaacctactcatctgacaaagggctaatatccagaatctacaatgaactcaaacaaatttacaagaaaaaaamaaacaaccccatcaaaaagtgggcgaaggacatgaacagacacctatcaaaagaa

SEQ ID NO: 261 - DNA, 401 bp, Homo sapiens
aacaccaaaaggaatggcaacaaaagccaaaattgaccactgggatctaattaaaytaaagagctgcacagcaaaagaaactaccatcagagtgaacaggcaacctacaaaatgggagaaaattttcgcaacctactcatctgacaaagggctaatatccagaatctacaatgaactcaaacaaatttacaagaaaaaaamaaacaaccccatcaaaaagtgggcgaaggacatgaacagacacctatcaaaagaagacatttatgcagccaaaaaacacatgaaaaaatgctcatcatcactggccatccgagaaatgcaaatcaaaaccacaatcagataccatctcacaccagttagaatggcaatcattaaaaagtcaggaaacaacaggtgctgga

SEQ ID NO: 262 - DNA, 401 bp, Homo sapiens
ttcttttaaaaaatcttcaataattctaccctaattttctgagcattttcttagccatctgaaagcttagttcaacaattttcaatgttttgttttttaatactaccttggcataacactgagggtatatccttattttctcattctcacactctcaatagttctatgtagtttgtaattttcattttgctgttcccttgwcctaaaagtaattttgaatgcgaagagcacttttcagtcacttaatttttaaaataaattttattgtgtacatttaaagtatacagcattatgttatggaatacacataggtagtaaaaatttattatggtgaagaaaattaacatatacataatctcatataggaagaaaaaactttgtgtgtggaaagagcagctaaa

SEQ ID NO: 263 - DNA, 401 bp, Homo sapiens
ttttttttatttacttttaatttttgtgggtatacagtaagtgtatatatttatggggtacatgaggtgttttcatacaggcatgtaatatcaaataagcacatcgtggagaatgggatatccaccccctcaagcatttattcttggagttacaaacaatccatttctattctttcagttattttaaaatgtacaaataarttgttattgattatagtctccctgttrtgctatctactaattaatagtagttcttattcataccttctattwttttttgtgcccattaaacatccctacctcccccaccaccaacatcccactatccttcctggcttctggtaaccatccttctactctctctgtccatgagtttaatagttttaatttttagatcccac

SEQ ID NO: 264 - DNA, 401 bp, Homo sapiens
gggtatacagtaagtgtatatatttatggggtacatgaggtgttttcatacaggcatgtaatatcaaataagcacatcgtggagaatgggatatccaccccctcaagcatttattcttggagttacaaacaatccatttctattctttcagttattttaaaatgtacaaataarttgttattgattatagtctccctgttrtgctatctactaattaatagtagttcttattcataccttctattwttttttgtgcccattaaacatccctacctcccccaccaccaacatcccactatccttcctggcttctggtaaccatccttctactctctctgtccatgagtttaatagttttaatttttagatcccacaataagtgagaacatgtgatgtttgtc

SEQ ID NO: 265 - DNA, 401 bp, Homo sapiens
tcatacaggcatgtaatatcaaataagcacatcgtggagaatgggatatccaccccctcaagcatttattcttggagttacaaacaatccatttctattctttcagttattttaaaatgtacaaataarttgttattgattatagtctccctgttrtgctatctactaattaatagtagttcttattcataccttctattwttttttgtgcccattaaacatccctacctcccccaccaccaacatcccactatccttcctggcttctggtaaccatccttctactctctctgtccatgagtttaatagttttaatttttagatcccacaataagtgagaacatgtgatgtttgtctttctgtgcctagttcatttcactccacatgatctccagttccat

SEQ ID NO: 266 - DNA, 401 bp, Homo sapiens
ccactgaaaagtctgctgctaggcatattggctctccattgtatgttatttgtttcatttttcttgctgcttttaggatccctgctttatccttgatctctggcagattgattattaaatacttgccattttgagtctattttctagatcctgtaggtgtgcttcattgttttttattatttttatttttttttctcttgyctcctctgtgtatcaaatagcttgtcttcaggctcacacgttctttcttttggttgattaattttgctattaaagkactctgctgtatttttcattatgccaattgcatttttcagcttcagaatttctgcttgattctttttaattatttcaatctctgttaaatttatctgataagattctgaattccttctctgtgt

SEQ ID NO: 267 - DNA, 401 bp, Homo sapiens
gatccctgctttatccttgatctctggcagattgattattaaatacttgccattttgagtctattttctagatcctgtaggtgtgcttcattgttttttattatttttatttttttttctcttgyctcctctgtgtatcaaatagcttgtcttcaggctcacacgttctttcttttggttgattaattttgctattaaagkactctgctgtatttttcattatgccaattgcatttttcagcttcagaatttctgcttgattctttttaattatttcaatctctgttaaatttatctgataagattctgaattccttctctgtgttatcttgagtttctttgagtttccataacacagcggttttgaattccttgtctgaaatttcacatatctctgtttc

SEQ ID NO: 268 - DNA, 401 bp, Homo sapiens
tattgtagtcttcactgtctaggcttatttgtagccatcctttttgaaaggacttgggtgttgtgatctaagctatatctgctttagcagcaccccaagcccagtaatgctgtggttcttgcagacttgtaaaggatcaccttgatggacttagacaagatccaggagaattttctggattactaggtagagactcttgtyctcttcccttactttctcccaaacaaacagaatctctttctgttctgagtcacctaaagctgggggtggagtgacacaaacacccctgtgaccacctccagtatgactgtgctgagtcagaactgaagccagcacagcactgggtctgcggtaaccactccctggctaatgcctatgttcatataaggccctgaggctct

SEQ ID NO: 269 - DNA, 401 bp, Homo sapiens
tttttcagggacgaaaagctcttcagttagcagaagatgaatgctgccaggattggatcctttctctcaaggttatgggttcttttatgacccaaggtgtgtctaaaatgttcatgtgggaggtagggcccagaacaggggccttttgactctgaccactgccctatcctgctatggctgagctggtatccaagatccaakacaaagtcctcccaacttttccctctcctcttctgaagtggaagaaagggatttcttttcgagctgtgagctgtgaagcctgggggtaggggaggggtgatgccggcactcctttatccacctcagctggtgtctcagtatgtcatgtgccccccccccccccccccagtccactgtttcaggacctggttcagcactgg

SEQ ID NO: 270 - DNA, 401 bp, Homo sapiens
ctggttcagcactgggactcacctaattgttgcagaccttatggactacattggctttcaagtttgtttggagacacagagcactttggtcactggtagtgaggtttgcaggaactcaagttctgacctctgggatccatgatccctctctgagtagtgccggtttaaatgcttccctcgtgggcaggtgtcagctgagtytggtccggtttccctttctgctccacctggatagcacaaaatttaatgtctcacagttgctatgttctctctcctctagcacccagagatgctctctgcaccatgccatgacttccagggggtggagaacaggtaatgtcaggggttcagggctcttttttctatctcttcagttgcctctttcagtgatatgaagttaa

SEQ ID NO: 271 - DNA, 401 bp, Homo sapiens
acaggtaatgtcaggggttcagggctcttttttctatctcttcagttgcctctttcagtgatatgaagttaaaaccaggtactatgagtgctcatctgatttttggttcttatgaagctgtttttttttttttttttttctgtgtagatagttgttaaattggtatctttgtggagaaggcaatcagtggagccttctgtkcggccatcttgctccttatacctgctactttgtattctctgatctatgtctcttcatttctccactcctctgttccaaccacccctggtaaccatgtttgtcttctctatttctgtatatttatttacttattttagaatctacttataaatgagatcatgcagtatttttctttctgtgtctggtttatttcacttgtc

SEQ ID NO: 272 - DNA, 401 bp, Homo sapiens
caagatctcattcttttttaaggctgaagaatatcccattgtatatatgtactacagtttctttatccattcatccatcaatggccacttaggttaggttgtttccatatcttggctattgtagaaaatactgcaatgaatatggaagtgggttatctttatgaggtgttgatttcatttcctttgggtatgcccagaagmgatattactgggacatgtgggagttctatttttaacttctttagaaaccaccatactcttttctataatggccacaccaatgtacattcccactaacagtgtatacaagttcccttttcttcatactcttactgacatttgttatcttcagttacttaatttttattggtgggaagggggctttattaacatttttttgt

SEQ ID NO: 273 - DNA, 401 bp, Homo sapiens
gtctaatccaccgttggtgggcacctaggttgattccacttctttgctattgtgaatagtgctgcaatgaacatatgactacatgtgtcttttgggtagaataatttattttcttttggatatatacccagtaatgggaatgttgggttgactggtagttctgttttaagttctttgagaaatctccaaactgctttccayggtgggtgaactaatttacattcctaccaacagggtataacattcccttttctcaacagcctcaccagcctttgttgtttttgacttttcaataatggtcataatgactggtgtgagatggtatctcattgtggttttgatttcatttatttgatgattattgatggtgagcatatttttatgtttgttggctgcttgta

SEQ ID NO: 274 - DNA, 401 bp, Homo sapiens
cattgaatctacagtttgggcagtattgccatttgaatgacagtgattcttctaatacataagcatgaaatgttttttcatttgtttgtgtcatccatgatttctttcagcagtgttttgtagttctctttgtagagatcttttacctccttggttagaggtattcgtaggtatttcatggtttttgcagcagttgtaaaygggattgctttcttggttttgctctcagtttgagtgttattagtatgtggaaatgaaactgatttttgtacattgattttgtatcctgaaactttattgaaattgtttattttatatatatatatattattatactttaagttctagggtacatgtgcacaacgtgcaggtttgttacatatgtatacatgtgccatgtt

SEQ ID NO: 275 - DNA, 401 bp, Homo sapiens
gagtgttattagtatgtggaaatgaaactgatttttgtacattgattttgtatcctgaaactttattgaaattgtttattttatatatatatatattattatactttaagttctagggtacatgtgcacaacgtgcaggtttgttacatatgtatacatgtgccatgttggtgtgctgcacccattaacttgtcatttatwttaggtatatcccctaatgctgtccctccccacttccccaccccacaacaggctccagtgtgtgatgttccccttcctgtgtccaagtgttctcattgttcaattcccacctawgagtgagaatatgcggtgtttggttttttatccttgcgatagtttgctgagaatgatggtttccagcttcgtccaagtccctacaa

SEQ ID NO: 276 - DNA, 401 bp, Homo sapiens
agggtacatgtgcacaacgtgcaggtttgttacatatgtatacatgtgccatgttggtgtgctgcacccattaacttgtcatttatwttaggtatatcccctaatgctgtccctccccacttccccaccccacaacaggctccagtgtgtgatgttccccttcctgtgtccaagtgttctcattgttcaattcccacctawgagtgagaatatgcggtgtttggttttttatccttgcgatagtttgctgagaatgatggtttccagcttcgtccaagtccctacaaaggacatgaactcatcatttttcacggctgcatagtattccatagtgtatatgtgccacgttttcttaatccagtctatcattgatggacatttgggttggttccaagtctttg

SEQ ID NO: 277 - DNA, 401 bp, Homo sapiens
tatttctagttctagatccctgaggaatcaccacactgtcttccacaatggttgaactagtttacagtcccaccaacaatgtaaaagtgttcctatttctccacatcctctccagcacctgttgtttcctgactttttaatgatcgccattctaactggtgtgagatggtatctcattgtggttttgatttgcatttctcrgatggccagtgatgatgagcattttttcatgtgtctgttggctgcataaaggtcttcttttgagaagtatctgttcatatcctttgcccacttgttgatagggctgtttttttcttgtaaatttgtttgagttctttgcagattctggatattagctctttgtcagatgagtagattgcaaaaattttctcccattctgt

SEQ ID NO: 278 - DNA, 401 bp, Homo sapiens
gtcaggattgtcaaagatcagatggttgtagatgtgtggtattatttctgagggctctgttctgttccattggtctatatctctgttttgttaccactacctgctgttttggttactgtagccttgtagtatagtttgaagtcagataacatgatgtctccagctttgttctttttgtttaggattgtcttggcaatgtgrgcccttttttggttccatatgaacttgaaagtagttttttacaattctgtgaagcaagtcattggtagcttgatagggatggcactgaatctataaattaccttgggcagtatggccattttcatgatatcgattcttcctatccatgagcatggaatgttcttccatttgtttgtatcctcttttatttcattgagcag

SEQ ID NO: 279 - DNA, 401 bp, Homo sapiens
tcatgatatcgattcttcctatccatgagcatggaatgttcttccatttgtttgtatcctcttttatttcattgagcagtggtttgtagttctccttgaagaggtccttcacatctcttataagttggattcctaggtattttattctctttgaagcaattgtgaatgggagttcactcatgatttggctctctgtttgtstgttattggtgtataggaatgcttgtgatttttgtacatttattttatgtcctgagactttgctgaagttgcttatcagcttagggagattttgggctgagacgatggggttttctaaatatacaatcatgtcatctgcaarcagggacaatttgacttcctcatttcctaattgaataccctttatttctttctcctgc

SEQ ID NO: 280 - DNA, 401 bp, Homo sapiens
tattctctttgaagcaattgtgaatgggagttcactcatgatttggctctctgtttgtstgttattggtgtataggaatgcttgtgatttttgtacatttattttatgtcctgagactttgctgaagttgcttatcagcttagggagattttgggctgagacgatggggttttctaaatatacaatcatgtcatctgcaarcagggacaatttgacttcctcatttcctaattgaataccctttatttctttctcctgcctgattgtctctgaagatagaccaatagcaggctctgaaattgaggtaataattaatagcttacctaccaaaaawagtccaggaccagatggattcacagccaaattctaccagaggtacaaggaggagctggtaccattcc

SEQ ID NO: 281 - DNA, 401 bp, Homo sapiens
atcagcttagggagattttgggctgagacgatggggttttctaaatatacaatcatgtcatctgcaarcagggacaatttgacttcctcatttcctaattgaataccctttatttctttctcctgcctgattgtctctgaagatagaccaatagcaggctctgaaattgaggtaataattaatagcttacctaccaaaaawagtccaggaccagatggattcacagccaaattctaccagaggtacaaggaggagctggtaccattccttctgaaactcttccaatcaatagaaaaagagggaatcctccctaactcatttcatgaggccagtgtcatcctgataccaaagactggcagagacacaacaaaaaaagagaattttagaccaatatccctgat

SEQ ID NO: 282 - DNA, 401 bp, Homo sapiens
ggaccagatggattcacagccaaattctaccagaggtacaaggaggagctggtaccattccttctgaaactcttccaatcaatagaaaaagagggaatcctccctaactcatttcatgaggccagtgtcatcctgataccaaagactggcagagacacaacaaaaaaagagaattttagaccaatatccctgatgaacatmggtgcaaaaatcctcagtaaaatactggcaaaccgaatccagcagcacatcaaaaagcttatccaccgtgatcaagtgtgtttcatccctgggatgcaaggctggttcaacatacacaaatcaataaatgtaatccagcatataaacagaactaaagacaaaaaccacatgattatctcaatagatgcagaaaacacctt

SEQ ID NO: 283 - DNA, 401 bp, Homo sapiens
taaaatactggcaaaccgaatccagcagcacatcaaaaagcttatccaccgtgatcaagtgtgtttcatccctgggatgcaaggctggttcaacatacacaaatcaataaatgtaatccagcatataaacagaactaaagacaaaaaccacatgattatctcaatagatgcagaaaacacctttgagaaaattcaacagcycttcatgctaaaaactctcaataaattaggtattgatgggacatatctcaaaataataagagctatttgtgataaacccacagccaatattatactgaattggcaaaaactggaagcattccctttgaaaactggcacaagacagggatgccctttctcaccactcctattcaacatagtgttggaagttctggccaggg

SEQ ID NO: 284 - DNA, 401 bp, Homo sapiens
aaactctcaataaattaggtattgatgggacatatctcaaaataataagagctatttgtgataaacccacagccaatattatactgaattggcaaaaactggaagcattccctttgaaaactggcacaagacagggatgccctttctcaccactcctattcaacatagtgttggaagttctggccagggcagtcaggcaaycagaaattggttatttgttccagtagtcttttggaggagtctttatggcttactcagtatagatcatatcatcagcaaagagagataatttgatttttttacctatgtggatgccttttatttctttctcttgcctgattcctctgggaaggacttgcagtactctattgaataggagtggtgagagttggcaaccttgg

SEQ ID NO: 285 - DNA, 401 bp, Homo sapiens
cttggcttgttccagttcttaaagagaatgctccccgtttttgcctgttcactacaatgttggctgtgggtttgtcatagatgtctcttattgttttgatatatgttccttcagtgcctagttttttgagaacttttaccaagaagggatgttggactatattgaaagttttttgcatctattgagatgataatattgttkttgttcttaattctgtatatgtggtgaatcacatttgttgatttgcatatgttgaaccaaatttgtawcccaagamttaagcctacttggtcacggtgaatgaactttttgatgtgctgctggattcaatttgttagtattttgttgaggatttttgtatctatgttcgtcatggatattggcctgtaattttcttttta

SEQ ID NO: 286 - DNA, 401 bp, Homo sapiens
ggtttgtcatagatgtctcttattgttttgatatatgttccttcagtgcctagttttttgagaacttttaccaagaagggatgttggactatattgaaagttttttgcatctattgagatgataatattgttkttgttcttaattctgtatatgtggtgaatcacatttgttgatttgcatatgttgaaccaaatttgtawcccaagamttaagcctacttggtcacggtgaatgaactttttgatgtgctgctggattcaatttgttagtattttgttgaggatttttgtatctatgttcgtcatggatattggcctgtaattttctttttaagttgcgtctttgccaggtttggttattagagtaggctgacttcatagaataagttaaggaagagtcc

SEQ ID NO: 287 - DNA, 401 bp, Homo sapiens
atagatgtctcttattgttttgatatatgttccttcagtgcctagttttttgagaacttttaccaagaagggatgttggactatattgaaagttttttgcatctattgagatgataatattgttkttgttcttaattctgtatatgtggtgaatcacatttgttgatttgcatatgttgaaccaaatttgtawcccaagamttaagcctacttggtcacggtgaatgaactttttgatgtgctgctggattcaatttgttagtattttgttgaggatttttgtatctatgttcgtcatggatattggcctgtaattttctttttaagttgcgtctttgccaggtttggttattagagtaggctgacttcatagaataagttaaggaagagtccctcctcct

SEQ ID NO: 288 - DNA, 401 bp, Homo sapiens
ccctcattgatttcttttatttttctagctttggggttagttttttgtatttctagtgtgatgttagattattaaattgagatatttctaccttcttgatgtaggagttcagcactatacactttcctcttaacactacttttgcagcatcccagagatttttggtatgtcgtctctctgtttttattcctttcaaataayttttttttgatttctacctttattttgttgtttaccccaaactcattcaggataagctgtttaaatcccatgtaatggggttttgagagatctgttggtattaatttctatttttattccactgtggtccaaaaatatggctagtatgatttcagtttttttgaatttagagacttgctttatggctaagcatgtgattg

SEQ ID NO: 289 - DNA, 401 bp, Homo sapiens
cttgatgatctgtgtaaggggatcagtggggtgttgaagtcccctgctattcttgtgaggctgtgtaaatcttttctaggtcaaaaagtacttgttttatgagtctgggtgctcccatgttgggtgcatacatatttagcatagttaagtctttttgttgaattgaaccctttatcattatgtaatgtccttctttgtccytttttactgytgttgatttaaagtctgtttttttctatgagaatagcaaccttagctcttttttgtgttccatttgcatgatagatcttttccaaccctttactttgagcctatgggtgtcattacatgtgagattggtctcttgaagacaacagtcaaatgggtcttgtatctttgtacaaattgccactctgtgcctt

SEQ ID NO: 290 - DNA, 401 bp, Homo sapiens
tgtgtaaggggatcagtggggtgttgaagtcccctgctattcttgtgaggctgtgtaaatcttttctaggtcaaaaagtacttgttttatgagtctgggtgctcccatgttgggtgcatacatatttagcatagttaagtctttttgttgaattgaaccctttatcattatgtaatgtccttctttgtccytttttactgytgttgatttaaagtctgtttttttctatgagaatagcaaccttagctcttttttgtgttccatttgcatgatagatcttttccaaccctttactttgagcctatgggtgtcattacatgtgagattggtctcttgaagacaacagtcaaatgggtcttgtatctttgtacaaattgccactctgtgccttttaagtgagg

SEQ ID NO: 291 - DNA, 401 bp, Homo sapiens
ctatgtacttaagtggtttttttttggtggagcaagtatatttctttcatttctatgtttaaatcttccttgaggatctcttataagggtggtctagtgttaataaatccccttagtgcttggttgtctgaaaaatattttattttttctttgcttatgaattttagtttggcaggatatgaaatcttggttggaatttcktttctttaacaatgctggaaataggcccccaatctgttctggcttataaggtttctgctgagaagtccagtgttagactgacggggttccctttgtgagtgttctgacctttttctctagctgtctttaagatttttgctttagcattgaccttagacagtctggtgacaatctgcctgggtgatgttcatttagtatat

SEQ ID NO: 292 - DNA, 401 bp, Homo sapiens
ccccaatctgttctggcttataaggtttctgctgagaagtccagtgttagactgacggggttccctttgtgagtgttctgacctttttctctagctgtctttaagatttttgctttagcattgaccttagacagtctggtgacaatctgcctgggtgatgttcatttagtatattatgtcacaggcattctctgtatttcytttgcttggatgtctacctgtctaggaagattagataacttttcttgaattattccctcaaatgttttctagattgttttctttgtctctctttctctcaggagtgccaataattcataggtttggtcacttcatataatcccatatttcttgaagaccgtttatttttaaaattcttttttctttacttttgtctgact

SEQ ID NO: 293 - DNA, 401 bp, Homo sapiens
cattacctttttaactccactttttctttttgtattttatttttgttttgctttttttttgttgctcttctcattcctctattcattgcatcctctaataattcttttcagacagcatttccaagtggtaaatgatgtcagtctttttctttctttctgtaatttctatatatttgaaatcctgtatttatctaactcttygtatttaccaggttagataaaactaatctggttaatttttatttctatagtaaaatttttttattataccttaagttctagggtacatgtgcacaaggtgcaggtttgatacataggtrtacatgtgccatgttgctttgcagcacccatcactcatcatttacattaggtatttctcctagtgctatmcctccccagcc

SEQ ID NO: 294 - DNA, 401 bp, Homo sapiens
tccaagtggtaaatgatgtcagtctttttctttctttctgtaatttctatatatttgaaatcctgtatttatctaactcttygtatttaccaggttagataaaactaatctggttaatttttatttctatagtaaaatttttttattataccttaagttctagggtacatgtgcacaaggtgcaggtttgatacataggtrtacatgtgccatgttgctttgcagcacccatcactcatcatttacattaggtatttctcctagtgctatmcctccccagcccccagccccccaacaggcctcactatgtgatgttccctgctctatatccaagtgatctcattgttcaattcccacctatgggtgagaacatgwggtgcttggttttcatccttgtgaca

SEQ ID NO: 295 - DNA, 401 bp, Homo sapiens
atctaactcttygtatttaccaggttagataaaactaatctggttaatttttatttctatagtaaaatttttttattataccttaagttctagggtacatgtgcacaaggtgcaggtttgatacataggtrtacatgtgccatgttgctttgcagcacccatcactcatcatttacattaggtatttctcctagtgctatmcctccccagcccccagccccccaacaggcctcactatgtgatgttccctgctctatatccaagtgatctcattgttcaattcccacctatgggtgagaacatgwggtgcttggttttcatccttgtgacagtttgctcagaatgatggtttccagcrtcatccatgtccctgaaaaggacgtgaactcatccttttttat

SEQ ID NO: 296 - DNA, 401 bp, Homo sapiens
acaaggtgcaggtttgatacataggtrtacatgtgccatgttgctttgcagcacccatcactcatcatttacattaggtatttctcctagtgctatmcctccccagcccccagccccccaacaggcctcactatgtgatgttccctgctctatatccaagtgatctcattgttcaattcccacctatgggtgagaacatgwggtgcttggttttcatccttgtgacagtttgctcagaatgatggtttccagcrtcatccatgtccctgaaaaggacgtgaactcatccttttttatggctgcatagtattccatggtgtatatatgccacattttcttaatccagtctatcattgatggacatttgggttggttacaagtctttggtattgtgaatagtg

SEQ ID NO: 297 - DNA, 401 bp, Homo sapiens
cccatcactcatcatttacattaggtatttctcctagtgctatmcctccccagcccccagccccccaacaggcctcactatgtgatgttccctgctctatatccaagtgatctcattgttcaattcccacctatgggtgagaacatgwggtgcttggttttcatccttgtgacagtttgctcagaatgatggtttccagcrtcatccatgtccctgaaaaggacgtgaactcatccttttttatggctgcatagtattccatggtgtatatatgccacattttcttaatccagtctatcattgatggacatttgggttggttacaagtctttggtattgtgaatagtgctgcaataaacatacatgtacatgtgtctttatagtagcatgacttctaatcc

SEQ ID NO: 298 - DNA, 401 bp, Homo sapiens
tgtgtctgttggctgcatagatgtcttcttttgagaagtgtctgttcatatcctttgctcactttttgatgggcttgtttttttcttataaatttgtttaagttctttgtagattctggatattagccctttgtcagatgggtagattgcaaaaattttttcccattatgtaggttgccggttcactctgatggtagtttyttttgccatgcagaagctctttagtttaattagatcccatttgcctactttggcttttgttgccattgcttttggtattttagtcatgaagtccttgcctatgcctatgtcctgtatggtattacctaggttttcttctagggtatttatagttttaggcctaacattcaagtctttaatccatcttgaattaatttttg

SEQ ID NO: 299 - DNA, 401 bp, Homo sapiens
ccttgcctatgcctatgtcctgtatggtattacctaggttttcttctagggtatttatagttttaggcctaacattcaagtctttaatccatcttgaattaatttttgtataaggtataaggaagggatccagtttcagctttctacatatggctagccagtttttccagcacgatgtattaaatagggaatcatttcccyatttcttgtttttgtcaggtttgtcaaagatcagatggttgtagatgtgtggtattatttctgaggcttctattctgttccatttgtctatatctctgttttggtaccagtaccctgctgttttggttactgtagccttgtagtatagtttgaagtcaggtagtgtgatgcctccagctttgttctttttgcttaggatt

SEQ ID NO: 300 - DNA, 401 bp, Homo sapiens
ttcctaattgaataccctttatttctttctcttgcctgattgccttggctggaacttccaacactatgttgaataggagtggtgagagggggcatccttgtcttgtgccggttttcaaagggaatgcttccagtttttgtccattcggtatgatattggttgtgggtttgtcatagatagctcttattattttgagatacmttccctcaatacctagtttattgagagtttttagcatgaagagctgtcgaattttgttgaaggccttttctgcatctattgagacaatcatgtggtttttgtcatttgttctgttaatgcaatggattatgtttattgatttgtgtatgttgaaccagtcttgcatcccagggaggaatctgacttggtcatggtggata

SEQ ID NO: 301 - DNA, 401 bp, Homo sapiens
gctcctctttgtacctctggtagaattcagctgtgaatccatctggtcctggagtttttttggttggtagcctattaattattacctcaatttcagagcctgttattgatctattcagagattcaacttcttcctggtttagtcttgggagggtgtaggtgtccagaaatgtatccatttcttctagattttctagtttayttgtgtagaggtgtttataatgttctctgatggtagtttgtatttttgtggaatcgatggtgatatcccctttatcrttttttattgtgtctatttgactcttccctgttttcttctttattagtcttgctagctataattttgttgatcttttcaaaaaaccagctcctggattcattgattttttgaagggttttttt

SEQ ID NO: 302 - DNA, 401 bp, Homo sapiens
attattacctcaatttcagagcctgttattgatctattcagagattcaacttcttcctggtttagtcttgggagggtgtaggtgtccagaaatgtatccatttcttctagattttctagtttayttgtgtagaggtgtttataatgttctctgatggtagtttgtatttttgtggaatcgatggtgatatcccctttatcrttttttattgtgtctatttgactcttccctgttttcttctttattagtcttgctagctataattttgttgatcttttcaaaaaaccagctcctggattcattgattttttgaagggtttttttaatgtatctatctctttcagttctgctctsttcttagttatttcttgccttctgctagcttttgaatgtgtttgctc

SEQ ID NO: 303 - DNA, 401 bp, Homo sapiens
atggtagtttgtatttttgtggaatcgatggtgatatcccctttatcrttttttattgtgtctatttgactcttccctgttttcttctttattagtcttgctagctataattttgttgatcttttcaaaaaaccagctcctggattcattgattttttgaagggtttttttaatgtatctatctctttcagttctgctctsttcttagttatttcttgccttctgctagcttttgaatgtgtttgctctggcttctctagttcttttaattgtgatgttagggtgtcgattttaaatctttcctgttttctcttgtgggcatttagtggtataaatttccctgtacacactgctttaaatgtgtcccagagattctggtatgttgtgtccttgttctcatt

SEQ ID NO: 304 - DNA, 401 bp, Homo sapiens
acactgctttaaatgtgtcccagagattctggtatgttgtgtccttgttctcattggtttcaaagaacatctttatttcttccttcatttcgttatttacccagcagttatttaggagcaagttgctcactttccatctagttgtgtggttttgagtgagtttcttaatcctgagttctaatttgattgcactgtggtctraaagacagtttgttgtgattgctgttcttttacatttkctgaggagtgctttacttccaactatgtggtcaattttaraataagtgtgatgtggtgctgagaagaatgtatattccgttgatttggggtggagagttctgtagatgtctattaggtctgcttgttgcagagctgagttcaggtcctggatatccttatta

SEQ ID NO: 305 - DNA, 401 bp, Homo sapiens
gtgtccttgttctcattggtttcaaagaacatctttatttcttccttcatttcgttatttacccagcagttatttaggagcaagttgctcactttccatctagttgtgtggttttgagtgagtttcttaatcctgagttctaatttgattgcactgtggtctraaagacagtttgttgtgattgctgttcttttacatttkctgaggagtgctttacttccaactatgtggtcaattttaraataagtgtgatgtggtgctgagaagaatgtatattccgttgatttggggtggagagttctgtagatgtctattaggtctgcttgttgcagagctgagttcaggtcctggatatccttattaaccttctgtcttgttgatctgtctaatattgacagtgg

SEQ ID NO: 306 - DNA, 401 bp, Homo sapiens
cttccttcatttcgttatttacccagcagttatttaggagcaagttgctcactttccatctagttgtgtggttttgagtgagtttcttaatcctgagttctaatttgattgcactgtggtctraaagacagtttgttgtgattgctgttcttttacatttkctgaggagtgctttacttccaactatgtggtcaattttaraataagtgtgatgtggtgctgagaagaatgtatattccgttgatttggggtggagagttctgtagatgtctattaggtctgcttgttgcagagctgagttcaggtcctggatatccttattaaccttctgtcttgttgatctgtctaatattgacagtggggtgttaaagtstcccattattattgtgtgggagtctaag

SEQ ID NO: 307 - DNA, 401 bp, Homo sapiens
tttacttccaactatgtggtcaattttaraataagtgtgatgtggtgctgagaagaatgtatattccgttgatttggggtggagagttctgtagatgtctattaggtctgcttgttgcagagctgagttcaggtcctggatatccttattaaccttctgtcttgttgatctgtctaatattgacagtggggtgttaaagtstcccattattattgtgtgggagtctaagtctctttgtaggtctctaaggacttgctttatgaatctgggtgctcctgtattgcatgcatatatattaggatagttagctcttcttgttgaattgatccctttaccattatgtaatggccttctttgtctcttttgatctttgttggtttaaagtctgttttatcagagac

SEQ ID NO: 308 - DNA, 401 bp, Homo sapiens
actgatagatgttgactctttattcaatttgccagtctgtgtcttttaattggtacatttagcccatctacatttaaggttaatattgttatgtgtgaattcatcctgtcattatgatgttcgctggttatttcgcccattaattgatgcagtttcttcatgccatcaatggtctttacaatttggcctgtttttgcagtsgctggtaccagttgtttctttccctgtttagtgcttccttcaggagctcttgtaaggcaggcctggttgtgacaaaactctcagcatttgcttgtctgtaaaggattttatttctccttcacttatgaagcttagtttggctggatacaaaattctggtttgaaaattcttttctttaagaatgttgaatattggccccc

SEQ ID NO: 309 - DNA, 401 bp, Homo sapiens
aggattttatttctccttcacttatgaagcttagtttggctggatacaaaattctggtttgaaaattcttttctttaagaatgttgaatattggccccccactctcttctggcttgtaaggtttctgccgagatatctgctgttagtctgatgggcttccctttgtgggtaacctgatctttctctctggctgcccttaamattttttccttcatttcaaccttggtgaatctgacaattatgtgtcttggggttgctcttctcgaggagtatctttgtcgtgttttctgtatttcctgaatttgaatgttggcctgccttgctaggttggggaagttctcctggataatatcctgaagagtattttccaacttggctccattctccccatcactttcagg

SEQ ID NO: 310 - DNA, 401 bp, Homo sapiens
actgatacactttcttccacttgatcgaagcagctgttgaagcttgtgcatgcatcatgaagttcttgtgccgtggttttcagctccatcaggtcatttaaggtcttctcttcactctttattgtagttagctattcatctaatctttcttcaaggtttttagcttccttgcaatgggtttgaacatcctcctttagctcrgagaagtttattaccaaccttctgaaacctacttctgtcaactygtcaaagtcattccccatccagctttgttctgttgctgacgaggagctgtgatcctttgaaggagaagagtcgctctgatttttagaattttcagcttttctgctctggtttctccccatctctgtgtttttatctgcctttggtctttgatgttg

SEQ ID NO: 311 - DNA, 401 bp, Homo sapiens
tgtgcatgcatcatgaagttcttgtgccgtggttttcagctccatcaggtcatttaaggtcttctcttcactctttattgtagttagctattcatctaatctttcttcaaggtttttagcttccttgcaatgggtttgaacatcctcctttagctcrgagaagtttattaccaaccttctgaaacctacttctgtcaactygtcaaagtcattccccatccagctttgttctgttgctgacgaggagctgtgatcctttgaaggagaagagtcgctctgatttttagaattttcagcttttctgctctggtttctccccatctctgtgtttttatctgcctttggtctttgatgttggtgacctatagatggggtttttgtgtagatgactttttgttgat

SEQ ID NO: 312 - DNA, 401 bp, Homo sapiens
tattcctttatgtttgttagttttccttctaacagtcaggtccctcagctgcaggtctgttggattttgctggacatccactccagaccctatttgcctgggtatcaccagcagaggctgcagaatagcaaatattgttacctgatccttcctctggatgctttgtccaagaggggcagccacctatatgaggtgcctgtyggcccctactgggaggtgtcacccagttagtcagggacccacttgaggaggcagtctgtccattctcagagctcaaccaccatgctgggagaaccactgctgtcttcagagctgtcagwcagggatgtttaagtctgtagaagttgtctgctttcttttgttcagctatgccctacccacagaggtggagactagaggca

SEQ ID NO: 313 - DNA, 401 bp, Homo sapiens
gcagaatagcaaatattgttacctgatccttcctctggatgctttgtccaagaggggcagccacctatatgaggtgcctgtyggcccctactgggaggtgtcacccagttagtcagggacccacttgaggaggcagtctgtccattctcagagctcaaccaccatgctgggagaaccactgctgtcttcagagctgtcagwcagggatgtttaagtctgtagaagttgtctgctttcttttgttcagctatgccctacccacagaggtggagactagaggcagtaggccttgttgagctgcagtgggctctgcccagttcaagcttccaggccactttgtttacctactgaagcctcagcaatggcggacacccctcacccagccaggctgtcgyctcaca

SEQ ID NO: 314 - DNA, 401 bp, Homo sapiens
tgtcagwcagggatgtttaagtctgtagaagttgtctgctttcttttgttcagctatgccctacccacagaggtggagactagaggcagtaggccttgttgagctgcagtgggctctgcccagttcaagcttccaggccactttgtttacctactgaagcctcagcaatggcggacacccctcacccagccaggctgtcgyctcacaggttgatctcagactgctgcactagcagggagcaaggctccatgagcatgggagctgccaagctaggcataggagagaatctccttgtctgctggttgctaagaccttaggaaaagcagggtatttgggcggaagtgtcctgtttttccaggtagtctgtctcggcttcccttggctaggaaggggaaatcccc

SEQ ID NO: 315 - DNA, 401 bp, Homo sapiens
aagaatctgtgccctgggctcaccatttctactgggtgttgacagttgcctgaagcacaactttgtctctctgacccagtgttttgccactctcctccacctgaagaagatttttttttttctattgcttggctcttgggcaggttgaggagagaagagaggagatgaaggatgtgtaggttgctcctgctgtaaagatcygccctattttgcctggcccctgtcctatttctagtttctgctaccttcagacatgaggttactggtgcttctcctgtcttttgtagtttcgactctcttaagtgcatttgggctgtggttcccatctccaattcaatcttctgctttctgccttttaaagtcctgacagtatctcctttttttttgttttctgttgttga

SEQ ID NO: 316 - DNA, 401 bp, Homo sapiens
gcagttagcagctacttagggctatagtttttagttatgtttttacagtatatatttccatcctatgttctcttactctagaaaatgtaagataaatctagggctatccctgtataattttagcctcatagaatcttgaaatgaagaataggtgttgaccagttttttagaaacagggtagggggtcttgttctttcatcraggctggagtgcagtggtctaatcatagctcactacagccttgacctcctgggctcaagccatcttcccaccttccaagtagttgggattagagtcatgagccaccatgcttggctccagttttcttatttgtttgccaagtggattgtcttcttttctgttattcaaacaaataaatatgcaaaacagcaaaaaaagtt

SEQ ID NO: 317 - DNA, 401 bp, Homo sapiens
tcaggaaaaaggctgctcatgttgtactaattctggcttctcatttccgtctcttagttctgcttctgtgggagctgccctccctgaaaatgtgtgtttctgtagtggggtacgatccactgacgttcctgaaggaagagcagttctttaggtgcctgacttggtgaggactttgtcattgatgccttaaagcatcaatgrtcatgatgagagccttacgtagtctttcatgaagtcagctccttcacctgtcaccatcccatttttccctccacaggtgtcaygtagggaggagagaaggaaattccttggcatcccctttatcatctttaccatttctttgaccttgtccaaccagtcatatcacaaacaagcaaacaaccaagcaaaacccaaatatt

SEQ ID NO: 318 - DNA, 401 bp, Homo sapiens
ctgaaaatgtgtgtttctgtagtggggtacgatccactgacgttcctgaaggaagagcagttctttaggtgcctgacttggtgaggactttgtcattgatgccttaaagcatcaatgrtcatgatgagagccttacgtagtctttcatgaagtcagctccttcacctgtcaccatcccatttttccctccacaggtgtcaygtagggaggagagaaggaaattccttggcatcccctttatcatctttaccatttctttgaccttgtccaaccagtcatatcacaaacaagcaaacaaccaagcaaaacccaaatattttcttcttttagtcaaaacacgaaaactaatatgaatattaattcatgcaaatgaaaacctgcaatgatcacccacaaaccag

SEQ ID NO: 319 - DNA, 401 bp, Homo sapiens
gtcaaaattggagccacttttcaagacctagctcaggattttgctctgaaacccttcctgatcctcccggtttaatttaatcactccttcctcttcttcttaacagcacttcttatctgtaccggtcctttgaccctgaatcatatgctactttatatggttcattgcatttgcaagcctatttgtctgatcttagctagwttaaaaagsctttgagggcagaggctgtttgtttctgtgcttatactatctagtggctgtatagggggaaaaattacatgttgatgatcccaactaatccttttgctccaggatacgtggcttcctcaggacatgccatgcatatgtgaggtctattttaattcataacatcctagatatggctccagagtcagataaac

SEQ ID NO: 320 - DNA, 401 bp, Homo sapiens
ggagccacttttcaagacctagctcaggattttgctctgaaacccttcctgatcctcccggtttaatttaatcactccttcctcttcttcttaacagcacttcttatctgtaccggtcctttgaccctgaatcatatgctactttatatggttcattgcatttgcaagcctatttgtctgatcttagctagwttaaaaagsctttgagggcagaggctgtttgtttctgtgcttatactatctagtggctgtatagggggaaaaattacatgttgatgatcccaactaatccttttgctccaggatacgtggcttcctcaggacatgccatgcatatgtgaggtctattttaattcataacatcctagatatggctccagagtcagataaacctaaatttg

SEQ ID NO: 321 - DNA, 401 bp, Homo sapiens
tgttttgtttcatgttaatgctttttcttccagcaactgcccaaagcccctcttcctcatgttggggctcagaagctgataccccaatacatggcgctttgacatgttgagttgaaggaaaagcctcaggtctctttgaccttcccctccactcccgatattctgtcttccccaaagcacagggtgaaattgttctctgargttccttgatctgcctaaagtctggaactgccaaagaataaaacaattacctctgttcccttccctgagtttgtattaattgaaatcacttttagggaagaaagattgaagtctgttaacacgcctggacagacttttgtcataaaccattgtcttctgcttcagtcccattcagtattatatagaaccatttaccagcc

SEQ ID NO: 322 - DNA, 401 bp, Homo sapiens
aagtctggaactgccaaagaataaaacaattacctctgttcccttccctgagtttgtattaattgaaatcacttttagggaagaaagattgaagtctgttaacacgcctggacagacttttgtcataaaccattgtcttctgcttcagtcccattcagtattatatagaaccatttaccagccattgtctgctctatgggyccaacagactttgtcccaggccattgtatattcttcaagcccattgaattcccctaaaaataatttactactccccccataaaatcatccatatttcctcatctcacattatcctaagaagaagggtagataaccacttgtaccccactgggtgttggggtgatcactctgtgatttctcccatgcatgttawtaagaat

SEQ ID NO: 323 - DNA, 401 bp, Homo sapiens
ctatgggyccaacagactttgtcccaggccattgtatattcttcaagcccattgaattcccctaaaaataatttactactccccccataaaatcatccatatttcctcatctcacattatcctaagaagaagggtagataaccacttgtaccccactgggtgttggggtgatcactctgtgatttctcccatgcatgttawtaagaatttatatgtcttttctagtattaatctgccttttgttgatttttttgcaaaactttggagggaaaaagggaagtttgcccttcacccctatacttttcttcttgtttgtagagtcactgactcattgttaccattttcttatctccattctcttaccaacccaatgcaatagagtttctcctacaggtcctctg

SEQ ID NO: 324 - DNA, 401 bp, Homo sapiens
gctgaggtgggcagatcacttgaggtcaggagtttgagaccagcctggccaacatggcaaaaccccgtctctactaaaaatacaaaaattatttgggcatggcggcacatacctgtaatcccatctacttgggaggctgaggcaggagaattgcttgaacctgggaggtggaggttgcagtgagccaagatggcgccactrtattccagcctgggtgaaagagtgagtgagactctgacacacacacacacacacacacatacacacacacacacacacaaagtagtaagcactcaggagttcgataaccacctttatgttgatggcttctaaatctctgatatcagtccagatccttttcttgacctcaactacagggccaactaactactagatttctc

SEQ ID NO: 325 - DNA, 401 bp, Homo sapiens
ctagatttctcaaacactattaagacagaactcttcacctctcccaggtctccaaatttattcttcctctcctgttccttctctcagggaatgacaccattatccattctgttgttattcaagtaaaacagactcacatccttcttgacatttcatttttttatatccaattaatcatcaaatttctactcaagcttcctkaccctgttttcctcttctgggtagataggtcttgtttgataattcatctgcaaatatatagactagagtgcttacttaaaaaccgctctcttgtttttcttttcatccacctgttaccacatagcttaatcagttttgccacatccctttcagtgtggacttagaaaatatacccccaaaaagcttcagtttcaattagc

SEQ ID NO: 326 - DNA, 401 bp, Homo sapiens
ctgggtagataggtcttgtttgataattcatctgcaaatatatagactagagtgcttacttaaaaaccgctctcttgtttttcttttcatccacctgttaccacatagcttaatcagttttgccacatccctttcagtgtggacttagaaaatatacccccaaaaagcttcagtttcaattagctgggcgtgatagcacgygcctgtaatcccagctactcgggaggctgaggcatgagaattgcttaagcccagaggtggaggttgcagtgagccaagaatgggccactgcactctagcctgggcgacagagcgagactccgtctcaaaaaaaaaaaaaaaaaaaaagaaatgaatgygcatatgactaccatcctaatataaatggagcttatgccagt

SEQ ID NO: 327 - DNA, 401 bp, Homo sapiens
cccaaaaagcttcagtttcaattagctgggcgtgatagcacgygcctgtaatcccagctactcgggaggctgaggcatgagaattgcttaagcccagaggtggaggttgcagtgagccaagaatgggccactgcactctagcctgggcgacagagcgagactccgtctcaaaaaaaaaaaaaaaaaaaaagaaatgaatgygcatatgactaccatcctaatataaatggagcttatgccagtactatttgcagtagtactacttgaaataatgctcacaataaattttatgcttattaaatagtaattatacataatatagaaagtcaaatagtgctacaaaacttacaataacaacactcattaacttgacccccttccaaatctgatttttttacttc

SEQ ID NO: 328 - DNA, 401 bp, Homo sapiens
cattaacttgacccccttccaaatctgatttttttacttctccaaggcaaccactttcaattcttttagttacactttcaacacttctattgttgtctccttatttctaaattaaatgcttatactgtgacttcttgattttaaactttaggtattatttattgacttcctgttttgagagttttgctttcttataccacwcctccccttgcctttcccccctgattaytcctctctccatcttcctaatagatttacatataatttctatttacgtttagaattttcattaccatgactatggctagagctgagccctgtagtgtactacatataataacatttttgttttactacaaatgcttttgcttttcctggagttaaaatgttcttattttaat

SEQ ID NO: 329 - DNA, 401 bp, Homo sapiens
tttttttacttctccaaggcaaccactttcaattcttttagttacactttcaacacttctattgttgtctccttatttctaaattaaatgcttatactgtgacttcttgattttaaactttaggtattatttattgacttcctgttttgagagttttgctttcttataccacwcctccccttgcctttcccccctgattaytcctctctccatcttcctaatagatttacatataatttctatttacgtttagaattttcattaccatgactatggctagagctgagccctgtagtgtactacatataataacatttttgttttactacaaatgcttttgcttttcctggagttaaaatgttcttattttaatgtgttttcttacatttctttttacctat

SEQ ID NO: 330 - DNA, 401 bp, Homo sapiens
ttactaaatcagtcatatgctttgcacaagcactataaaaatcttctcagtatggtcaggtttttttcttttttcttggcgaattcctcctagaaatctctatctgactactctaatcttaactggttacattctaagcctgctccacagctgttgttttagacacttatattcactcttttttggaaattccctttaccrctctccttggttctttgtaacattactggatttcctgaatactatttcttagattccatcttatttgttagagcacattctccaataatttcctgagaaaggggttaggggaaataatgttttgtagaaacttgcatgtctgaaactatgtattatattgtcacatttgattagctgttttgccagacattgagttttaa

SEQ ID NO: 331 - DNA, 401 bp, Homo sapiens
gtagagactgggtttcacccagtcaggctggtctggaactcctgacctcagctaatccatctgcctcagcatcccaaagtgctgggattacaggagtgagccaccatacccagctgatattacattttaaaaaggagagtctgggtaggcctcattgagaatgtttgatgatgcttgactgctcatcatatttacaaatgmggtatgaaaaagtaattggaagcactttgtaaatgtgtgcatgtgggggatggattgttttgtgaaccattgggccttaccatagattaattgagcatttaaccacttctttgggccctttgccttgaactgactgctttctccaggagaagctttattctcctgtctgaaacatatgtgccagactgccagcattctgr

SEQ ID NO: 332 - DNA, 401 bp, Homo sapiens
mggtatgaaaaagtaattggaagcactttgtaaatgtgtgcatgtgggggatggattgttttgtgaaccattgggccttaccatagattaattgagcatttaaccacttctttgggccctttgccttgaactgactgctttctccaggagaagctttattctcctgtctgaaacatatgtgccagactgccagcattctgragccaagtcactatgtagatcatctctctttttatttgagacaaggtctggctctgtcgcccaggctggagtgcagtggcatgatctcagctcactgcaacctctgcctcccaggccaatgcyatcctcccacctcagattcccaagtagctagggctccagccacgcaccatcatgcccagctaatttttatatttttt

SEQ ID NO: 333 - DNA, 401 bp, Homo sapiens
ccttgaactgactgctttctccaggagaagctttattctcctgtctgaaacatatgtgccagactgccagcattctgragccaagtcactatgtagatcatctctctttttatttgagacaaggtctggctctgtcgcccaggctggagtgcagtggcatgatctcagctcactgcaacctctgcctcccaggccaatgcyatcctcccacctcagattcccaagtagctagggctccagccacgcaccatcatgcccagctaatttttatattttttgcagagacaggatttcaccatgttttccaggctggtctcaaacccgtgagctcaagtgatccacctgccttagcctcccaaagtgctgggattacaggcctgagccaccatgcccagtcaata

SEQ ID NO: 334 - DNA, 401 bp, Homo sapiens
tttggaggaagacaagataaacctgccctatttaataagaagtccaaaataaaagacttaatccaaattacttgaaaacttttctgaatatatgaaataaaattttcattctcacaatgagaatagtctttcattctctatgaattctccaaataatttagtgattaagaaaacagatctattttcttaatatttcataarccttttggttacatactaaaacaatgtattaatattcttatacggtaatcatatttgagttggttcattagactttattttaacattatgagtaatttttttttttattagaaagtcttttgaattgtagggcataaggaatttttagttgtgactcctaggtctaacatttaaaaaaattcaaaacacactgtcttagc

SEQ ID NO: 335 - DNA, 401 bp, Homo sapiens
attttgtaagcctgactccatagaccataaaatattggaaagatcacttgctatgaagtcaataaacttggaatttaatctcaactataccactggctacctgactttaaatgaaatgaacacttttgacctcaagttcctaatctttaaaatggggcttaaactagttggcctaataccaatattgaatgattatttgayagttacatagaaatagattggatgtagaaatagagatatgaattgcatggtgtttgctcactagaatgtggaaaactgtaaaggatgcatgaatatcaagcaaagagaaataagtcacataggttgcctgccattctttaatgcttattttctttcaattttttctttttaataatcttactaaagtgaagctggggctg

SEQ ID NO: 336 - DNA, 401 bp, Homo sapiens
ttggatgtagaaatagagatatgaattgcatggtgtttgctcactagaatgtggaaaactgtaaaggatgcatgaatatcaagcaaagagaaataagtcacataggttgcctgccattctttaatgcttattttctttcaattttttctttttaataatcttactaaagtgaagctggggctgttagtggtggcaaatccrtatgggyctgcagcaaccttacttcttgcctccttagaagaaagaattcaactgaggggcattaggcagagggagaaactgaggaaagttttagagcatgagtgaaagtttatttaaaagctttagagaagtaatgaaattcctttcattacttctcaagccggcgacttgagagatcaagtgcactgtttgccctttga

SEQ ID NO: 337 - DNA, 401 bp, Homo sapiens
tagaaatagagatatgaattgcatggtgtttgctcactagaatgtggaaaactgtaaaggatgcatgaatatcaagcaaagagaaataagtcacataggttgcctgccattctttaatgcttattttctttcaattttttctttttaataatcttactaaagtgaagctggggctgttagtggtggcaaatccrtatgggyctgcagcaaccttacttcttgcctccttagaagaaagaattcaactgaggggcattaggcagagggagaaactgaggaaagttttagagcatgagtgaaagtttatttaaaagctttagagaagtaatgaaattcctttcattacttctcaagccggcgacttgagagatcaagtgcactgtttgccctttgacttgggg

SEQ ID NO: 338 - DNA, 401 bp, Homo sapiens
tctggttatgtctgcctgactgactactgtaacagggccaggtcattttcttgcttaaacatcttactatagtccataggataaagatcatcactcctactcatgacatatgcacagccattgccagtggtttcaaaaggcttgcacatcacgaaggctcaataaatgttattgatttgaactgaacagtaaatagatcamgatggtataactgccttttagtgctcatagccaatgttctaaaacattctcctggtctatttttttgtctggctgccgtattgctatgatttctaaaaaaacccatagttttctggatcaggaagacactttactggtgggtcaggttatagagatcactgagaatgaagattttagtagtaaaatgatgtaaataatct

SEQ ID NO: 339 - DNA, 401 bp, Homo sapiens
gggaaaaaaagttaatagatttgctgaattttaactatttctctcctttatttttcatatcttttggatatttacttgattaccagggttcaagcaaatgattctcaatttgcttgaatcattgttttagatttattgtttagaataattgttttagattgtttatttcatgctgctttctgtgtgactgctctaggaacraagtcatgagtagaagccagggaggcatgaaagaaaaagtcttgtggcacccacaccgagaagatgctaagcagagatgtgaggaaacaaagctgagaattgagggacaatccaagggaaagaagtggactgggaaatsggttctcctggcctggaaaagacacgtcaccacagraaaaaatctggctccagagaacaat

SEQ ID NO: 340 - DNA, 401 bp, Homo sapiens
ttagaataattgttttagattgtttatttcatgctgctttctgtgtgactgctctaggaacraagtcatgagtagaagccagggaggcatgaaagaaaaagtcttgtggcacccacaccgagaagatgctaagcagagatgtgaggaaacaaagctgagaattgagggacaatccaagggaaagaagtggactgggaaatsggttctcctggcctggaaaagacacgtcaccacagraaaaaatctggctccagagaacaatttattttaatatgcctcattttgctatttcattaattcagaaatacttggcctttttttctactgttactgtggaggcataataggaaatgtaaacatactggtacaaaataagaaataacttatttatatggcaggaa

SEQ ID NO: 341 - DNA, 401 bp, Homo sapiens
ctttctgtgtgactgctctaggaacraagtcatgagtagaagccagggaggcatgaaagaaaaagtcttgtggcacccacaccgagaagatgctaagcagagatgtgaggaaacaaagctgagaattgagggacaatccaagggaaagaagtggactgggaaatsggttctcctggcctggaaaagacacgtcaccacagraaaaaatctggctccagagaacaatttattttaatatgcctcattttgctatttcattaattcagaaatacttggcctttttttctactgttactgtggaggcataataggaaatgtaaacatactggtacaaaataagaaataacttatttatatggcaggaagactagaaaaatcacagccattttcttcttcttact

SEQ ID NO: 342 - DNA, 401 bp, Homo sapiens
gaaacattctctctgatatgtttttaatttgttttattcccattttgctattgcaattttcccacctgccaatggagataaggggctgtttcattctttctcttttggctcgcgaaggccacacgcttgttttgttaaggagagtccacctatcaccaggagggacagaagtcagctcaggaagggagaccctgccagggractcagccatgaggtaaggccagccatgagtccaaagacaagtattcctgagcacctgaccgctatttatcaaacattgttctaggggatgtggggaattgtaagagaagctcaagacagtgttcttgtctgggctgatgaaaccttatcctaattcaggctacagtgaatactttatgtgcaytctgagtgttcctatc

SEQ ID NO: 343 - DNA, 401 bp, Homo sapiens
ggagaccctgccagggractcagccatgaggtaaggccagccatgagtccaaagacaagtattcctgagcacctgaccgctatttatcaaacattgttctaggggatgtggggaattgtaagagaagctcaagacagtgttcttgtctgggctgatgaaaccttatcctaattcaggctacagtgaatactttatgtgcaytctgagtgttcctatcctttccttgttatatggcaggagtttttgatatagggtacatggaccccaggaggcccttggatagaacacaagtggtaaaattccatcttttaaataattaactactaactgaaatttagccatttcttcaattatatatgttggcacaaaccacagtagtattaagagtgtctctgaccttg

SEQ ID NO: 344 - DNA, 401 bp, Homo sapiens
ggaccccaggaggcccttggatagaacacaagtggtaaaattccatcttttaaataattaactactaactgaaatttagccatttcttcaattatatatgttggcacaaaccacagtagtattaagagtgtctctgaccttgtcagcagtagaaaacactgatatttttatataatatcacagttgttgcagatatcttgraacatcatttgtgctttatcactatttttgaaaattatagtagttattagacctgcagctagagtttgttacttaatgcattcatatagaaagacatcattaaatcacatttttctggatacttttataattgtacttcaatgcaattggtgtcttttgtaatcctacgtattttctttcatacattcaaacactcatcg

SEQ ID NO: 345 - DNA, 401 bp, Homo sapiens
atgccttatataaatatatcaatgcaatgatttattattacagctgttatgccatagcatgttgggttgctgacaattttttatttttttttgtgacgaagttttgctcttgttgcccaggctggagtgcagtggcgtgatcttggcttactgcaacctctgcctcctgggttcaagtgattctcctgcctcagcctcccragtagctggaattataggtgcctgccaccatgcccagctaatttttgtattaatttttattattaattttatatttcaccatgttggccaggctggtctcgaactcctgacctcaggtgatccacccgccttggcctcccaaagtgacggtattacaggcgtgagccaccacacctggctgacaaatttgtatgtatgta

SEQ ID NO: 346 - DNA, 401 bp, Homo sapiens
acaagcctgggagatattaaccgagggatcccatggtttctcacttttccattcttccatgaagtcactgtttcacatagcttggagtctgtgaaccatgccaatatatgtgtctttttaacatggttcattttttaagtacatcattggtttggagagatgagaatgagaagatgagttaacttttattgtgaggcaccygtatggtttagactttcactgcaactttgttacaggtgagcgatatgcccttcatttcacagactctgtggggtgtccatcagcacatgagtaaagatcttcctttggagggtaaccactttctgacattaactgtgtcttgatggagaacacagcatatgagttatgagttttggcctgcgagttgtgaaagatgactc

SEQ ID NO: 347 - DNA, 401 bp, Homo sapiens
gaggaaggagcagaattgggaagaggggaaaagtgggctgtgatgcagtctaatcaaagtcataggtaatcccagaggaaagtctgagactggatggctcttggggattgtcatgagttggggcaaaggggtcagtccttcataaccctgagatcagtctttatttgctgcacccagggagaagccatgaccttgagcaargatgcgcttttcagccaggacacttaacaaagagggctgacagctgtcagcacttccagaagctggtaaaataagaccttcattcttaaagggacatcttggcagaataccaatgactattytagtccactgcttataccactcagatacacatcttcatatacatactgaaaatcaatcttctaggatcttagtaggtt

SEQ ID NO: 348 - DNA, 401 bp, Homo sapiens
gcaaaggggtcagtccttcataaccctgagatcagtctttatttgctgcacccagggagaagccatgaccttgagcaargatgcgcttttcagccaggacacttaacaaagagggctgacagctgtcagcacttccagaagctggtaaaataagaccttcattcttaaagggacatcttggcagaataccaatgactattytagtccactgcttataccactcagatacacatcttcatatacatactgaaaatcaatcttctaggatcttagtaggtttcttttgctggcagaatgttgtaagattaaggttgataggataaactggtacccttgcagaaacagctagttgcaagatctcaaatgatatttatcatctctcttcttcactatccacttta

SEQ ID NO: 349 - DNA, 401 bp, Homo sapiens
tgggtgccaaacatatttcttcgtgctccccattgtatataagaatgctactttctttcagggttaattgctaccaccaagatggtgactctttttattttaagctggtcacttgctatgaggaacctgaaatgcccaggtgtcagccaaagcttatattacaactagaattttcctatgtttcctggtggaagcatttcytctttggcttgaacttcaagccatgcagctccaagagttgcaggtatgagaagcacaaatttcccaagtgggtcactgtgagtggtgataagtgggaccactcttgcttccatatatcagttcctggatccatgtattcaagcacctgggatacaataccatataaagatcattgatttagggtgtacagtgtatttggg

SEQ ID NO: 350 - DNA, 401 bp, Homo sapiens
ttgctcatgaacccatgcacattctaactacaggacacttccttttctatgtaaagagctcaccacatgcactgccacttgtcactgttgttaagggccacctcaatgtcaggctgtgatatagctttcatccatttcctgcttgcacacacataccaagccaacccatctctaaaccaattttttttttgtttttgaaawtgatacataataattatatgtgtttatggggcacatgtgatattttcatacatgcatgcaatgtgtaatgaccaaatcargatatccatcaccttaaacatttatcatttttttgtattggaaacattccaaattttctcttctaactattctcaaatatacaataaattatagttaagtatagttatcctactgtgcta

SEQ ID NO: 351 - DNA, 401 bp, Homo sapiens
gtcactgttgttaagggccacctcaatgtcaggctgtgatatagctttcatccatttcctgcttgcacacacataccaagccaacccatctctaaaccaattttttttttgtttttgaaawtgatacataataattatatgtgtttatggggcacatgtgatattttcatacatgcatgcaatgtgtaatgaccaaatcargatatccatcaccttaaacatttatcatttttttgtattggaaacattccaaattttctcttctaactattctcaaatatacaataaattatagttaagtatagttatcctactgtgctatcgaacactagaacctgtccttctaaatgtattttttgtacccattcatcaaccacttttcacgtcctctttcccaattt

SEQ ID NO: 352 - DNA, 401 bp, Homo sapiens
tcactggcaccacagtctgaatttctatagattcttttaatgctttggtcattacttaaagttagcagtctttcatgctacctgacatatgatttggtgctgtattcctgcaatggaatatgctgcctccagaacatgggaacgcctactaggcaaggtgcttccttatttgtgatagaaagtgcaaattgcaataatttktattttctttggaagggatatcccaaaatactcaaaaccataggacttctaaaaatattactaatatatcaggccctgaatctctatagagtttatctcttatcctctagtgtgtatatgttttacctaggcctacaatgtacttgtcacttcttttttctagttggttcaattgccatgacatcctagatatagtggac

SEQ ID NO: 353 - DNA, 401 bp, Homo sapiens
tttttttttttttttttggtgggtgggggtgcggggggtgagtggttgaactaattgaattaattggagatacaatggggctcaccctcctccatccattaggtctttcattgaagccattaaatttctgccaaattccaggaagacctggaatatgacagtttattagagagtaccctggaaaaaatagccatgaaagtraaaaaaaggaagcaagcttggacagaagaaaaaactggactgaaatacaatctcagtgagtaccataactgatctctagagagctcttggtgtgcattggccctacagagctgtcctgagctaggtgaggagactggccttgatagtcttgtattgaccatttcccagatgcgtggtcaaggcagttctcttcaaccaag

SEQ ID NO: 354 - DNA, 401 bp, Homo sapiens
gtggatcacttgaaatcaggagtttgagaccagcctggccaacatggcaaaaccccgtctctactaaaaatacaaaaattagctgggcgtggcggtacacacctgtagtcccagctacttgggaggctgaggcgcgagaagcactcaaacctgggaagtggaggttgcagtgagcagatgttgcgccactgcactctagcytgggtartagagcgatactccatcaaaaaaaaaaaaaattaatggatgcttttggcaaattcaggactgaaaattgctgtgacttttcctccatgagagtttctgcagtttgggtcataagagttaaatatggttaatacttcattaagtactgtttaactttagcaacctaagacattacatgtcatcaattgttctga

SEQ ID NO: 355 - DNA, 401 bp, Homo sapiens
acttgaaatcaggagtttgagaccagcctggccaacatggcaaaaccccgtctctactaaaaatacaaaaattagctgggcgtggcggtacacacctgtagtcccagctacttgggaggctgaggcgcgagaagcactcaaacctgggaagtggaggttgcagtgagcagatgttgcgccactgcactctagcytgggtartagagcgatactccatcaaaaaaaaaaaaaattaatggatgcttttggcaaattcaggactgaaaattgctgtgacttttcctccatgagagtttctgcagtttgggtcataagagttaaatatggttaatacttcattaagtactgtttaactttagcaacctaagacattacatgtcatcaattgttctgactttgtg

SEQ ID NO: 356 - DNA, 401 bp, Homo sapiens
gtaactataaggcagaaagaaaaatggcaacatcagagcataatacgaagattcatgggaaatgggagcagaggagaaggagacccagccttctggggaagacagtgtaggattagagaggaggctgtatttcagctgagactgaggaggggaggtaagacctaccagaaagaagtaccaccaatgtaaacatatcatcaraagtatgttgtgtaatgtatctaagcaatgtagtaaaaaagcgtagtggttaaactttactctcctaggatattgcggtatattttatatttgctatatatagtacatagtagtatacagaatatgtgtatatgtatatgttactacgtaatatacatatactactttccaaatagtatactgcagtacactgccaaaag

SEQ ID NO: 357 - DNA, 401 bp, Homo sapiens
catggtgcccattacttttgcagtctgaggtgtgacagcaaaactggcatgaatttttttcctttttcacaatttcataggtagaagattcatattttactgtaaatcttgaaaacctcagcataagatttttcctttccttattaagttgagaacttacacattttcacttaaaggaagcacttaatggcttctctttcrcagatccaaattatcagcatcactactattgcattttggggctattattaagtgaaataagagtaacttgaatagaagcatagtgataacgcaacagcagatctgataactgagatggctcataagtgactcatgggcagagagtatactgggcaaaaggaggattcatgacctgagtgggatggagcaggatggtgtga

SEQ ID NO: 358 - DNA, 401 bp, Homo sapiens
taaggaaatagagaacttgaacagcactatagacaaattggagccaatagatacagaacactacacccaacagcagcagaatacatattttctcaagtatgcatggaacattctctagaataaatcacatgttaaaatacaaaacaaggcttaataaattttaaaagattaaaatcacagaaagtatcttttttattacartggaatgaaactagaaatcaacagcagaaggaaaactggaaattctacaaatatgtgagttagacaacacgatattcaacaatgaatgggtcaaagtgaaatcacataggaaattgtaaaatatcttgaggcaaatgaaaataaaaacaccatgtgttgaaatgtgtggaatgtaagaaaaacagtgttaagacagaagt

SEQ ID NO: 359 - DNA, 401 bp, Homo sapiens
cagggagcctgaagacaaaattgcaggatggtcccaaccccccagagttcaatcataccacccaagggtattgagctgaaatctgtggccagagctcaagcaggaaggagccccactctcaaaacacagagaagaatgaggcatgggttcctgtgtcagtgtgagtgctagatgttcctccctctgcaaaactggtctggrcaaggtgtagtctgttggccagccacagcttctgtttgagggagccctggaagagcccagtgatctgggcacagaaggttttggacgagtttagctgttcaggcctgctcctgtggcagacactggagggagacctggtagggagatggtgagctgggtggactccacagccatttgctgggctaaaagatcccagggca

SEQ ID NO: 360 - DNA, 401 bp, Homo sapiens
ggcccatattcttaagtgctatctactgtatcaaagcttgaattataccaccaaacaaaaataaatttcttcagcatagaaagcctgtgaaactcaaagcaggaaactagccacaactaaggaacccacacagaactttggccctctgaaagcacccagaaaagaagccaatagattatgcactagaagtaccacagtcargccggatgcagtggctcatgcctgtaatcccagcactttgggaggctgaggcaggcggatcatgaggtcaggagatcaagaccatcctggctaacatggtgaaaccccatctctactaagaatacaaaaaaattagccaggtgtggtggcaggtgcctgtagtccctgctactagggaggctgaggtaggagaatggcat

SEQ ID NO: 361 - DNA, 401 bp, Homo sapiens
aacatttttatatatatcaacagtgttcaagctgagagacaaatgaagaatgcaatctcatttacaatagctataaaaataaaataaaataaaaaataaaataaaataaaataaaataaaatacatctgaccaaagcggtgagagatcggtacaaagataattaaaaaaacactaccaaaagaaatcagaaatgacacaartggaaaaacattccacattcaaggactggaagaatcagtattgttaaaatggacatagtgctcaaagcaatgtacagatacaatgctatcattggtagtttcctatcaaactaccaatgtcatttttcatagaattagaaaaagctattataaaatttgtctggaaaaaagagtccatatagccaaagcaatcctaagca

SEQ ID NO: 362 - DNA, 401 bp, Homo sapiens
ttgggggggtgaagccaagatggccaaataggaactgctccagtctacagctcccagtgtgagcgatgcagaagacaggtgatttctgcatttccaattgaggtactgggttcatctcactggggagtgtaggaaagtgggtgcaggacagtgggtgcagtgcaccgtgcatgagctgaagcagggtaaggcatcacctcwcccaggaagtgcaaggggtcagggaattccctttcctagtcaaagaaaggggtgacagacggcacctggaaaatcaggtcactcccaccctaatactgtgcttttccaatgggcttaacaaatggcacaccaggagattatatcctgcacatgactcggagggtcctatgcccacagagcctcgctcattgctagcacag

SEQ ID NO: 363 - DNA, 401 bp, Homo sapiens
aaggatatccaggatttgaactcagctctgcaccaaacagacctaatagatatctacagaactctccaccccaaatcaacagaatatacattcttttcagcaccgcaccacacctattccaaaattgaccacatagttggaagtaaagcactcctcagcaaatgtaaaagaacagaaattataacaaactgtctctctgaycacagtgcaatgaaactagaactcaggagtaagaaactcactcaaaaccgctcaactacatggaaactgaacaacctgctcctgaatgactactgggtacataacgaaatgaaggcagaaataaagatgttctttgaaaccaacgagaacaaagacacaacataccagaatctctgggacacattcaaagcagtgtggag

SEQ ID NO: 364 - DNA, 401 bp, Homo sapiens
tatccaccatgatcaagtgggcttcatccctgggatgcaaggctggttcaacatacgaaaatcaataaatgtaatccagcatacaaacagaaccaaagacaaaaaccacatgattatctcaatagatgcagaaaagtcctttgacaaaattcaacaacacttcatgctaaaaactctcgataaattagttattgatgggaygtatctcaaaataataagagctatctatgacaaacccacagccaatatcatactgaatggacaaaaactggaaacattccctttgaaaactggcacaagacagggatgccctctctcaccactcctattcagcatagtgttggaagttctggccagggcaatcaggcaggagaaggaaataaagggcattcaatgaggaa

SEQ ID NO: 365 - DNA, 401 bp, Homo sapiens
tatactacaaggctacagtatccaaaacagcatggtactggtaccaaaacagagatatagaccaatggaacagaacagaaccctcagaaataatgccgtacatctacaatcatctgatctttgacaaacctgagaaaaacaagcaatggggaaaggattccctatttaataaatggtgctgggaaaactggctagccataygtagaaagctgaaactggatcccttccttacaccttacacaaaaattaattcaagatggattaaagacttacatgttagacctaaaaccataaaaaccgtagaagaaaacctaggcattaccattcaggacataggcatgggcaagcacttcttgtctaaaacaccaaaagcaatggcaacaaaagccaaaattgcaaat

SEQ ID NO: 366 - DNA, 401 bp, Homo sapiens
ataccacagtgagataccatcttaccctagttagaatggctattactaaaaagacaagcaacagatgctgggaatgatgcagagaaaaggaaactcttacacactgttggtttgaatgtaaattagcacagccattatgaaaaactgtatggagatttttttcaaaaatctaaaaatggaattaccatatgatccaacaakcccactaccaaatatttatccaaaggaaaagaaatcagtatgtcaaagacatacctgcacttggacgtttattgcagcactattcataacagcaaaggtatggggtcaacctaaatgtccatcattgaatggatggataaagaaaatttggtatgtacacacacacacacacacacacacacacacacacacacatacac

SEQ ID NO: 367 - DNA, 401 bp, Homo sapiens
gaaattagaacccttgttcactgttggtgggagtgtaaaatggtacagctgctatggaaaacagtatggtggttcctcaaaaaatgagaaaatgattactatgtgattcagcaagtccacttctgggtatataccccaaagaattgaaagtagggtctcgaggagatagttgaacacctatgttcatattaacattattgrcaatagctaaaaggtgaaagcaacctaaatgtccattgatggatgaatggataaacaaaatgtggcatatgcctatgatggaatattattcagccttagaaaggaaggaaattctgacacatgctacaaatatgggtgaaccttaaggacagtatgccaggtgaaattggccagtcagaaacagaaatactgtatgactc

SEQ ID NO: 368 - DNA, 401 bp, Homo sapiens
atattttcccatttagtaagatattggcttaggatatctatctatctatcttatcatgctaagaaagaaattttaagtttcttttttttttagtgttttcaccaggaatcagtattgaatttcatcagaggatttttcattatctatggagatacataattttttttcttagatttaataatgtggattataataccaatrggttatctaatattggaccaactttgcattctgaaagaaattccacttagttgtgttgtattgatttcacaatgtataagattctgtttgctaatgttttagttggtatttttacatcaatatccataaacatactgctctgtaggtttttttttgtatttttaaaaatttagatttaggtattagtgtagtacttgctt

SEQ ID NO: 369 - DNA, 401 bp, Homo sapiens
taaacatactgctctgtaggtttttttttgtatttttaaaaatttagatttaggtattagtgtagtacttgcttcttaaaaattgggaactttttattcatctttaatgttctgcagcactctataaaacattggaaatatcaaatctttgatgattcggtagaatttttttccaaagttatctgggcaaggtgctttttkgttgatgtttttcttaataacttactttttatcttctatggaaaatgttgtctatctataactgagtcaaatatcatttattttattgccctaagaaattatccatttcctctgttttcaaacctatttgcatagaggtctgcaaaatagtcacgatattttaaatttttgtttcagtggttgtttccccttgtcatctt

SEQ ID NO: 370 - DNA, 401 bp, Homo sapiens
aatttttaaatcagaaatatttagtttatttagttctgtgacttttcctctaaatactaatttcaatacatctttccattattatttttcagaaattttgtcatgtaagtttgtattttccctttaggtagaatgttttctaataaacattttttcttaaaatttgcgtggaagagtctttttgctctttaattctgttarcaatttctagtttttattgcattatgatatttattgttgtgatatttctactttttgaaacttactgatattttctttgtgacttaatatttgattatgttttgtaaatgttttattgcacttgagaagaggtgtattatttactgtatggctgtaagtttggtatatgcttataaagtttggtatatggttataaaatc

SEQ ID NO: 371 - DNA, 401 bp, Homo sapiens
tggaagttagcagcaggacaaggattagcatccagaccaaacattatgtgaataaatgagaaaaataatatcaataaaaggaagtgatattttcatagagaaggacacagaattggacgtagtggctgatatttgtaatctcagcagtttgggaggttgaggtgggaggatcacttgaggccaagagtttgagactagccygggccacatagtgagaccctgtctctacaaaaaaaatttttaaaaatagctgggtgtggtggcatacaactctagtcttagctacttgggtggctaagacatgaggattgcttgaacacaggaatttgaggttgtagtaggctgtgatcgtgccactgcacttcagcctgggcaacagaacaatatcttacatctacaga

SEQ ID NO: 372 - DNA, 401 bp, Homo sapiens
ttctgcctcaaccacctgagtagctgggactacaggtgtacaccaacacacccagctaatatttttattttttttgcagagacaaggtctcactatgttgtccaggctggtctcgaactcccagactcaagcagtcctcctgcctcagcctcccaaagtgctgggattataggcatgagtcaccatgcccaaccaagactrattatttttggaacctgttttaagatgtgttggcattctcaatcaggtttagaatagttgtatagactatacacgaagattcaaaacatttcttaaaatattctatttttagccagtttgcatttaagtactttaaaaagggggcatttcatcagagacaatgctaggtatatttaccttactatatccatggctctatg

SEQ ID NO: 373 - DNA, 401 bp, Homo sapiens
tctgagaggccctaaacgttcagattctaaggtatgcagtgtagtagaccatcttctggatctaaaggactctttcaagggagaacagtagccctgtcaagatttcggggacattagtaaaaatttgcagagagatgttttctacatgcctatgacctggaactatctgtggaagatggtaaacaaagaatgttaatactragtttgttttgtgttacacagtttaaaatgcggtgagaaagccaggtgagactatgaaattttggagctggtgtattacattgtgcatggataagtactgtatttgctcttccaaaccagagatcaggtgaaattatgaagacaaccttttcaggtattatatagggagaaattaaagagaaatttatttgtgtttttat

SEQ ID NO: 374 - DNA, 401 bp, Homo sapiens
gaaagcattctaataagtaatttaaaaaaataagcttcattgagttacaatttacatacaagaaaattaatacaatgaattttacagttagaaatgcataatttgatgaattttggcagatgtggatagtcatgtaagtaccacaaaagtcatgatatagaacatttctatcatccaaaaagagttctttcatgttccacrtcaattaatgtcattgctccacaccttggaccctggtaactaatgatttgttttctattgctataattttgccttttctggaattttatattcatttttttttgtggccagctttttaaacttttcatactgcttttgagattcacctatgttgtatgtattaatagctgatttctttttatgacagagtagtattccat

SEQ ID NO: 375 - DNA, 401 bp, Homo sapiens
ggatttcatcaaaataaaaaacatttgatttttaaagacaccactaataagatataaaatcaagccacagactgggagaaatgattcacaacacgtatatgaagaaagtaacttatatgtagcacaggcaaaaatacagtcatgactcattaataagacaaacactaaataaaaaaataggcaaaaggtatgaatagactyytccagaaaagatatatggatggcaaataagcacattaaaaagtcactagggaaatattaattatgatcmcaataaaatatctctatatacatacatattaaaatggctacaaatggtaaaaaatgaccattccaaatgttggcaaggatctggaggaaatagaactttcataaactagtttgattgtaaaattgtacaa

SEQ ID NO: 376 - DNA, 401 bp, Homo sapiens
gatttcatcaaaataaaaaacatttgatttttaaagacaccactaataagatataaaatcaagccacagactgggagaaatgattcacaacacgtatatgaagaaagtaacttatatgtagcacaggcaaaaatacagtcatgactcattaataagacaaacactaaataaaaaaataggcaaaaggtatgaatagactyytccagaaaagatatatggatggcaaataagcacattaaaaagtcactagggaaatattaattatgatcmcaataaaatatctctatatacatacatattaaaatggctacaaatggtaaaaaatgaccattccaaatgttggcaaggatctggaggaaatagaactttcataaactagtttgattgtaaaattgtacaac

SEQ ID NO: 377 - DNA, 401 bp, Homo sapiens
actgggagaaatgattcacaacacgtatatgaagaaagtaacttatatgtagcacaggcaaaaatacagtcatgactcattaataagacaaacactaaataaaaaaataggcaaaaggtatgaatagactyytccagaaaagatatatggatggcaaataagcacattaaaaagtcactagggaaatattaattatgatcmcaataaaatatctctatatacatacatattaaaatggctacaaatggtaaaaaatgaccattccaaatgttggcaaggatctggaggaaatagaactttcataaactagtttgattgtaaaattgtacaaccacattggaaaacacttttggcagtttctttaaaagttttatacataccctatggcccagtcattccac

SEQ ID NO: 378 - DNA, 401 bp, Homo sapiens
atcaatgaatgttatgaaatttcacaattcattagagaaaaatgaagtttaaatggtaagaatataaactcttaagttaatatgcttaataattaagaacttttgccttggagtagatgaagaaacccaagaattatatattaatttaacgaagagaaaaatatctatttaaagaattgaccattttctaaaattccagarcaacagtgcacataattggatgctcataacaacacagaaaaggatgctcagtctgtgaagttcagtctcaaccagttttgcattttatcttcatctttaatatcaggatagatattataacttaatgctttggtattttcctcaatatttcctttgggagactgaattttttcatagataaaagggaggtatacagatac

SEQ ID NO: 379 - DNA, 401 bp, Homo sapiens
ggcgtcactcggttgcccaggctgcagtgccttagcacaatcatagctcactgcagcctcaagctcttaaggctcaagggatcctcccacctcagcctcctgagtagctgggaccacaggtgtgcaccactgtgtctggctcctattacacagaacattttacttggttttctcactgattttgtgatgttgtcctaattmcatagcgctggcacaaagattatataagcagtagggtactttgtggactcacgtgtggccaggtttgtcccaggatcttcaccctttcactcccttacttgtgactcaccccagcctatacagtgggaagaaattgaggtggagttgaagggattcatagaggtaatgaccccttggattgctggggagggctgtggcaa

SEQ ID NO: 380 - DNA, 401 bp, Homo sapiens
tttgcctttcctggggctgccagggagtacagaatcgggagtgaaactgatcctgagcgagtgcacagtgctccttgatgattactcctccgcaaattcagagactggcgcttactgcttatctggggaattctgaaggcaagggggcagctggaacagccataacgacagcaaaatgagggggtgtccgagagtagcctrctttttttaatcctgtggcatggaaaggatgtgtgactttcccacagatgaagaggatgctgtgaaaggtaaaagctcccttaaaagtttcttgcttcaaaggtggcttgctaaggcaagagaacaccctagtagtaggttgggatgggaggagatatatcattaagaataggtaagggagaatgtcaagaggcgagcac

SEQ ID NO: 381 - DNA, 401 bp, Homo sapiens
ctttagtcttctcttcctctgttctgaccttagagaaaccagaagagtggggtaaggataggaaggaaaagagaaggaacagtccagtttcttctccaccactgcagccctgagttaggggagtagaagagaagctttgaattggatatgaaattaaattttgatttagactggaccagatacctttaatccctgcatggrtgccatcattgatggaatggggcttctttgtatacctgagagaatggggcagctatgggatctgcctgagacaaggactgagagatgcatatccaacaaagcatgcttaaaagcagtgattggagagaagtaaagccatttcctgctaagttcagactgttcagtcaattgattatactgagagagattatgcagtaaag

SEQ ID NO: 382 - DNA, 401 bp, Homo sapiens
ggaatggggcttctttgtatacctgagagaatggggcagctatgggatctgcctgagacaaggactgagagatgcatatccaacaaagcatgcttaaaagcagtgattggagagaagtaaagccatttcctgctaagttcagactgttcagtcaattgattatactgagagagattatgcagtaaagttatttagctgackggtaaagagtctctttggggatggtgtgcccagcgcacaaggttaaggagttggaagatttcttctgtgaataaaatcaatgtttggggctcagtctatcgggaatgacttattactagtactaaaatttgtgtgtgtgagatttaataagtctttaatatggtcttcatttgttgcttcatttattcaaacatttatta

SEQ ID NO: 383 - DNA, 401 bp, Homo sapiens
tttgagcccaggaactcatgctatgctgcttctcataatataaggtatttcctctaatacagaatttaatttagactgtgactaagtttaaagacaagattacaaggagaaggattaatgtgacctgaaaacattggataagacttcagactcatatgttccaatgctcctggaaggccaaccataaatggaaggtgtatytttaggacctggaatgaaagggcacggtagtatcatttcagagtttcagctgtttgtaatatttattataatatcttttttggtcttatcacccagagacatgttctttgcaataaaatagacagcttaatagatttctttaatattatttggagcagacatcataatttcatttagactttaagccttaggagatatct

SEQ ID NO: 384 - DNA, 401 bp, Homo sapiens
attatgtatcctatcacttccagaaacagtttttggaagaaagagagtctaggcctacagcttcttaggaaggcttaacacagggtttttagttgtgctattgtggctcctaggcaaagtgcagaaatgagagagccagtacctgagtcctaaacctccttctgacaacaatcctcttcatgaccctgggaagggcaatcmactttccggaacctttttatcacatatgaaattaaggggtttggactagatatctaggattctttcctggtctaacatttgatgtatttctctatggttcaaagcataacctaatggggaagtttatgacattctaacatggcatactgggttaggagtggatgttaaaatatttatttataccactctttcatcagtaa

SEQ ID NO: 385 - DNA, 401 bp, Homo sapiens
tacagaaaaaactggtgtgaaacttaccagtagggcaagaagttgattacctctcttgttttgatctcttttattacatgtctttgttttgcaggcctctacacttcagtgccctccttgacctagtaataaactctcctccacactgaagccttcactgaaaacttcggaatagaagttggcataaagtatagtaattaygactttcgtggactgaygtgtatgttaaggacttcaaagcatcctactattcagatgtgtggactgtgctaaagtagaagaatctataaaaccaaaggaaaacaaaagtgacaaaactggaggagttttatttttatggagwcagatgggcaaagtaaggtaggttgaatgccacttcagttctaaaagtctatttattt

SEQ ID NO: 386 - DNA, 401 bp, Homo sapiens
tgaaacttaccagtagggcaagaagttgattacctctcttgttttgatctcttttattacatgtctttgttttgcaggcctctacacttcagtgccctccttgacctagtaataaactctcctccacactgaagccttcactgaaaacttcggaatagaagttggcataaagtatagtaattaygactttcgtggactgaygtgtatgttaaggacttcaaagcatcctactattcagatgtgtggactgtgctaaagtagaagaatctataaaaccaaaggaaaacaaaagtgacaaaactggaggagttttatttttatggagwcagatgggcaaagtaaggtaggttgaatgccacttcagttctaaaagtctatttattttctcttggtctgactgg

SEQ ID NO: 387 - DNA, 401 bp, Homo sapiens
acactgaagccttcactgaaaacttcggaatagaagttggcataaagtatagtaattaygactttcgtggactgaygtgtatgttaaggacttcaaagcatcctactattcagatgtgtggactgtgctaaagtagaagaatctataaaaccaaaggaaaacaaaagtgacaaaactggaggagttttatttttatggagwcagatgggcaaagtaaggtaggttgaatgccacttcagttctaaaagtctatttattttctcttggtctgactggaagtgccatctatatagcccaacattttcaagagaaggatgacgatgaaggcttccatggcaaaataatgagaaaattgtcaaattgtcaaaaatcaagctttaggattcaacctttgacactca

SEQ ID NO: 388 - DNA, 401 bp, Homo sapiens
ggattcaacctttgacactcatgattcatgatatgctttctttactcagcagtggtgtgtgttactttaaatgtttagaaaacatacatgtgcatgtatctttatagcagcatgatttatagtcctttgggtatatacccagtaatgggatggctgggtcaaatggtatgtctagttctagatccctgaggaatcgccacrctgacttccacaatggttgaactastttacagtcccaccaacagtgtaaaagtgttcctatttctccacatcctctccagcacctgttgtttcctgactttttaatgattgccattctaactggtgtgagatggtatctcattgtggttttgatttggatttctctgatggccagtgatggtgagcattttttcatgtgt

SEQ ID NO: 389 - DNA, 401 bp, Homo sapiens
tcatgatatgctttctttactcagcagtggtgtgtgttactttaaatgtttagaaaacatacatgtgcatgtatctttatagcagcatgatttatagtcctttgggtatatacccagtaatgggatggctgggtcaaatggtatgtctagttctagatccctgaggaatcgccacrctgacttccacaatggttgaactastttacagtcccaccaacagtgtaaaagtgttcctatttctccacatcctctccagcacctgttgtttcctgactttttaatgattgccattctaactggtgtgagatggtatctcattgtggttttgatttggatttctctgatggccagtgatggtgagcattttttcatgtgtcttttggctgcataaatgtcttctt

SEQ ID NO: 390 - DNA, 401 bp, Homo sapiens
ttcatatccttcacccactttttgatggggttgtttgtttttttcttgtaaatttgtttaagttgattgtagattctggatattagccctttgtcagatgagtaggttgcaaaaattttctcccattctgtaggttgcctgttcactctgatggtagtttcttttgctgtgcagatgtgcagaagctctttagtttaattmratcccatttgtcaattttggtttttgttgccattgcttttggtgttttagacatgaagtccttgcccatgcctatgtcctgaatggtaatgcctaggtttccttctagggtttttatggttttaggtctaacatttaagtctttaatccatcttgaattaatttttgtataaggtgtaaggaagggatccagtttcagc

SEQ ID NO: 391 - DNA, 401 bp, Homo sapiens
tcatatccttcacccactttttgatggggttgtttgtttttttcttgtaaatttgtttaagttgattgtagattctggatattagccctttgtcagatgagtaggttgcaaaaattttctcccattctgtaggttgcctgttcactctgatggtagtttcttttgctgtgcagatgtgcagaagctctttagtttaattmratcccatttgtcaattttggtttttgttgccattgcttttggtgttttagacatgaagtccttgcccatgcctatgtcctgaatggtaatgcctaggtttccttctagggtttttatggttttaggtctaacatttaagtctttaatccatcttgaattaatttttgtataaggtgtaaggaagggatccagtttcagct

SEQ ID NO: 392 - DNA, 401 bp, Homo sapiens
actattcacaatagcaaagacttggaaccaacccaaatgtccaacaatgatagactggattaagaaaatgtggcacatatacaccatggaatactatgcagccataaaaaaggatgagttcatgtcctttgtagggacatggatgaaattggaaatcatcattctcagtaaactatcacaaggacaaaaaaccaaacaccrtatgttctcactcataggtgggaattgaacaatgagaacacatggacacaggaaggggaacatcacactctggggactgttgtggggtagggggaggggggagggatagcattaggagatatacgtaatgctaaatgatgagctaatgggtgcagcacaccagcatggcacatgtatacatatgaaactaacctgcacat

SEQ ID NO: 393 - DNA, 401 bp, Homo sapiens
cacatgtatacatatgaaactaacctgcacattgtgcacatgtaccctaaaacttaaagtataataataataataataataataataaatgtttagaaaaaaattctatcataaatatgaccatttaatttcctacaagtttttcaaaagtttcttcttgggtttattcatccctatggaaaattccttagagagatttargaatcttcagtgaatacttttagaacaaatggaaagaaagcaaaaatgctgtttcatcattgagaaaaataaaactcaaaacaagcttaaccatcaaacctcttctttattccaatttgtcatatttgtaatagcaacaataagctsttcttagaaataatgtgttcttagaaataaataaaatgcatgtttcttactgc

SEQ ID NO: 394 - DNA, 401 bp, Homo sapiens
aagtttcttcttgggtttattcatccctatggaaaattccttagagagatttargaatcttcagtgaatacttttagaacaaatggaaagaaagcaaaaatgctgtttcatcattgagaaaaataaaactcaaaacaagcttaaccatcaaacctcttctttattccaatttgtcatatttgtaatagcaacaataagctsttcttagaaataatgtgttcttagaaataaataaaatgcatgtttcttactgctaaatgccagtgtacaatgaaatttccaagccaattttttggggaaaaggtgtaacttctgtataatgtatttaggatcttaagtggcatatttctgttggatggtttatatgttatctatagatagcacctcactactaaggcata

SEQ ID NO: 395 - DNA, 401 bp, Homo sapiens
agatggggagagacaagactgtcggccccacaccagcaatcactgactcagtctaaacaaagagtaacataataatggtatacaacagagaatcaccgtttaaattttatgaccaggtctttaataagtatcttgcagcctgttatagaaaaacactttcaaatagtgtgatatgtctcataatgggaaaagcgtcccccrgaagtactgagcatccagcaataaaggcatttaagtagacatatcatatgatcaactttaagaggcagtttccaacatgtgttgtcttcattgccggattggaagaaacccgggggcaacgtatcatttatttagcrtaacattgtattttgcataatactagagtttctaaagaattttcatatatactaagctatttt

SEQ ID NO: 396 - DNA, 401 bp, Homo sapiens
gcctgttatagaaaaacactttcaaatagtgtgatatgtctcataatgggaaaagcgtcccccrgaagtactgagcatccagcaataaaggcatttaagtagacatatcatatgatcaactttaagaggcagtttccaacatgtgttgtcttcattgccggattggaagaaacccgggggcaacgtatcatttatttagcrtaacattgtattttgcataatactagagtttctaaagaattttcatatatactaagctattttaatccttgcaagcaycctgtgaaataaagcaaggactctgcttatttaataaataaggaaagaggctcagcatgattcataaattttcctggagtttcaggactggcaaatagcagaattggagtgtgatgccagcc

SEQ ID NO: 397 - DNA, 401 bp, Homo sapiens
ccagcaataaaggcatttaagtagacatatcatatgatcaactttaagaggcagtttccaacatgtgttgtcttcattgccggattggaagaaacccgggggcaacgtatcatttatttagcrtaacattgtattttgcataatactagagtttctaaagaattttcatatatactaagctattttaatccttgcaagcaycctgtgaaataaagcaaggactctgcttatttaataaataaggaaagaggctcagcatgattcataaattttcctggagtttcaggactggcaaatagcagaattggagtgtgatgccagccaattatatccttaaactttacatatattgcccagtgtaaaagttcaagaatgcttatttctttgttatctggaaaggg

SEQ ID NO: 398 - DNA, 401 bp, Homo sapiens
tacttctactgagtagagaaactatgtatttatttatatgtatgttaaaaatgaaaccaacataggtcatttgggagaagaactccttagaataaaaatattttaaaaagtggatttaaatatctgagttagaatatttcactagcactaggggatcgttcttgttgttgtggggtatctataaatcctctgaatgtaggraaagtcttaccatatgtcctgatgtattaagtaagactaggagctttagacaacagagaattaaaacagtgagctgtacttcctctggcttgtatatttatagcaaatgagagcaaaagatgtgattgggcgggttattgcccttgtcaaatataatctattcattcttccggaaatctcctttgcttcgatacctattt

SEQ ID NO: 399 - DNA, 401 bp, Homo sapiens
cacaatatgtatcctcatttacttacatcttctttgatttttttttattatactttaagttttagggtacatgtgcacattgtgcaggttagttacatatgtatacatgtgccatgctggtgcactgcacccactaactcgtcatctagcattaggtatatctcccaatgctatccctcccccctccccccaccccacaasggtccccagagtgtgatattccccttcctgtgtccatgtgatctcattgttcaattcccacctatgagtgagaatatgcggtgtttgatcttctttgatttatttcatcagtgttttatagttttcagtatacaagttagaactattgttatatttattatacctaaatatttttattttttgagtgattataagtgtta

SEQ ID NO: 400 - DNA, 401 bp, Homo sapiens
cttgtatcttgcaaccttactgaactcacttattagttctatgcactttttttatagattctttgggcttttctaaacagaaaaacctgtcatctggaagtagggactgttttctttctttctttgcagtcagtctaccatttatttcgttttcttgtcttcttggactggctagaacttccagtactatattgaataaargcagtgagagcagaaatgcttgccttgtttctgagaatagtgaggaagcattcagtcttttatcatcatgtgtaatgttagctgtasgttttttgtagatactcttcatcaaactgaagttctcctctatgcctgtgtttctgagagtttttatcaggggtaagtattgaattttggcaaatactttttctatatcctgt

SEQ ID NO: 401 - DNA, 401 bp, Homo sapiens
tgtcatctggaagtagggactgttttctttctttctttgcagtcagtctaccatttatttcgttttcttgtcttcttggactggctagaacttccagtactatattgaataaargcagtgagagcagaaatgcttgccttgtttctgagaatagtgaggaagcattcagtcttttatcatcatgtgtaatgttagctgtasgttttttgtagatactcttcatcaaactgaagttctcctctatgcctgtgtttctgagagtttttatcaggggtaagtattgaattttggcaaatactttttctatatcctgtgtagttttccaaacttggaaactcttctgcactctagctgccttcacatgggcaagtgttttcatatcattctgtgttcctctgtat

SEQ ID NO: 402 - DNA, 401 bp, Homo sapiens
atcaggccaggattttactcctggctccttctatcctttgcatagtgagatcatattctctttgagtctgtttcttcatttacaaatagaagaaaaatagctgcagtgatgatcaggtgacttgatagaggaaatgcttagtcaatgtaattggtttatagatagtaattaatgtgagagttttccccagatttttatagwcttcctttatcatttattgctttaccacaataagtcatttgtcaaggaggaacacgtatatttccctagagaacacaccgatwtgagaacatacgaagcctacactcctcattcaggaacaggcaagagacaagtgtacatctagttccaccaagaaaacacacacacacattaacataccagtaatagtaagaaagctt

SEQ ID NO: 403 - DNA, 401 bp, Homo sapiens
aaatagaagaaaaatagctgcagtgatgatcaggtgacttgatagaggaaatgcttagtcaatgtaattggtttatagatagtaattaatgtgagagttttccccagatttttatagwcttcctttatcatttattgctttaccacaataagtcatttgtcaaggaggaacacgtatatttccctagagaacacaccgatwtgagaacatacgaagcctacactcctcattcaggaacaggcaagagacaagtgtacatctagttccaccaagaaaacacacacacacattaacataccagtaatagtaagaaagcttttatggagattctgaaacatctattagaccttgaaagataacttagtatttacatgggaggagacacacttcaacctaccacg

SEQ ID NO: 404 - DNA, 401 bp, Homo sapiens
tgtcaggatggaaagtaggttggtctgatcaagggagtcctgtcatgggaggtgagaagacctgggatctggtactggatttgcttctcactcctaacatgatcatgaaaatattttctgcttccttccttattagcaaaatcaggtagatataaaaggctctgaagcagactgggttgttgtaatggcaaagggggaacytaaaaaattctggactgagatgtgggagtcacaccattgtccactgcagacataccaaacaagccaccttaatttagagcacaggcttgtgagtctagtgatgctgttcaatcatacattttaatctctataaaatgtaatctcctatgcacaaaggtagtaccaatagcacttgagtgcctcgaagagagttttgccca

SEQ ID NO: 405 - DNA, 401 bp, Homo sapiens
tttttgtccttgcgatagtttgctgagaatgatggtttccagcttcatccatgtccctacaaaggacatgaactcatcattttttatggctgcatagtaacagcaggttctggagaggatgtggagaaataggaacacttttacactgttggtggggctgtaaactagttcaaccattgtggaagtcggtgtggcaattcytcagggatctagaactagaaatacacgtatgtttattgtggcactattcacaatagcgaagacttggaacccacttcccacttttgtttcctttaattgcccttatgagaccacatccaaaatcccaagtcctgccaagtgaatgcagtacttaaagatttgactactggatgtctggtcttggagaaaacagtcaagag

SEQ ID NO: 406 - DNA, 401 bp, Homo sapiens
aagccaatgtgcagaaggccttgtttcactacccctaaaacagtgcatgtgcaggaggactgttattgctgtgctttggaaggtctgtggatgaggaaatgtagaattgcagatttatgggttggaagttgatttagaagacacatgtaacagaagtaacaatcttatcagacttaccagtgtcttccacttatttccttwacttcagatgctcaggaacgacagcacytgcagaatgcatccactgctgaaaaatgagagctgtttcttgttggtactcttcagggacattttagcatagtggtggactccagtgttgacttttcttttcatcatctgtttgatcttggtggattcttaagaatctctggacctgagtttgttcatctgttgattggggt

SEQ ID NO: 407 - DNA, 401 bp, Homo sapiens
ctacccctaaaacagtgcatgtgcaggaggactgttattgctgtgctttggaaggtctgtggatgaggaaatgtagaattgcagatttatgggttggaagttgatttagaagacacatgtaacagaagtaacaatcttatcagacttaccagtgtcttccacttatttccttwacttcagatgctcaggaacgacagcacytgcagaatgcatccactgctgaaaaatgagagctgtttcttgttggtactcttcagggacattttagcatagtggtggactccagtgttgacttttcttttcatcatctgtttgatcttggtggattcttaagaatctctggacctgagtttgttcatctgttgattggggttcatggtagccacttctcaaggttatga

SEQ ID NO: 408 - DNA, 401 bp, Homo sapiens
ccttacttccttcagattttcgctcagataccatgttattcatgaggcttccctggccaccccatttaaaagcagcaccccaccagcattgcctatcacccccaccctgctctgtattacctgataacactaatgaccgtctggcagattatatctttatttgcatatttattatctgtattctgtctttagaatgaagayagaggctttattccagtgactgaaacaatgcctgacatgtaatggaactcaataaataattgttgaaataatgaatgaataaatgattagcctttaatttgtattcattcgtacacattacattggggttttctagaagacagtatgaaaatttcacttaatttgtgactcaagtacagaaagaacgatagagatcagag

SEQ ID NO: 409 - DNA, 401 bp, Homo sapiens
gtaaagataaatgtaattgtttttgaaatcaaccacttgtccctaatgctcaatctgtgcttctgagaatttgccgagtttcaatgctttaatgtgtgtattgaacagggctttctgttgcaaatagcagaatttgcacacgctagttgaatcagaaaacaataacgtaacaacagatactaataaacacgtagaatctcrgagagtgccaaagagcagggttctggggctacacagccacaccttaggacttctctctaatcatatgacttctcagcacctgtgatgccaggacttggcctcccaaagctgaggaaccaaatgcctcaccaactgctcctgccagaaaactggttctccctggtttggtgcccatactctttgaattttctggctttaaa

SEQ ID NO: 410 - DNA, 401 bp, Homo sapiens
ggatttctgttgtccttcaatcaaccatctacctaagcctcaaaccgttttgttttgcttaaaaacagaatgagtttggcaaacctagaaaagtacacaaaggatcatccatggatataggatggaagatgtatgaatatggaccaacaacagtgtttattttaataattctaatattgttataagttgtcataagcttaytttcgtaattagagaatagtcttcaatttacactgaatgcatgtttggcaaatatactaatgttatatatgtacttctcttgttcagggcagtcacttgttttaagtaacatgtttatctttattaaaatatgaatttcatgcggttttacagcaaggttattggttaaatcaatattctcaattaatgaaactagtgac

SEQ ID NO: 411 - DNA, 401 bp, Homo sapiens
acacgtggaggatactagaggctgccatgacaatattagccaaaaaatgataaaccacaacgtgatagaaggaagaatcctcactttatagttgagccccgagtaagtgaggaaagttgtgcaagtttgtaacttcagtgtgatggttgaggatggaattaaagtctcctgactgcttatgaaacctcccacctatatgtktttacgcaaaatgtcatggcccttacatccttttgtttccattgctatgatggttctggattgtaatcctataagaatatgatcacttaatgaatttatgttcattatatttcatatgcagcctgaaatgcctctggtttctttattagcaaatcaacagaaaacacttgataaccagattcaagattagacagcaaaga

SEQ ID NO: 412 - DNA, 401 bp, Homo sapiens
agggatcttaagaaatttttttagaaaggatatgggaccctaaaactattgaagtaacaagaaattaggacaagaaactaatatgggaccctaaaactattgaagtaacaagaaattaggacaagaaactaacagtgatagaggaagggtactggcttgttagatttgggctcaccgtttggcaatccatctctaaacccyatcacaacttatttataataataatcttggtgctgatcatcataatctgggtatgcagatttacctacataattttaggcaaattggttaacccctctggacatttaattcctcatctgtgaaggagttacacaagaatacatttattggtttaaataactactgttcaatagagaatttttaaattagcatctgtagct

SEQ ID NO: 413 - DNA, 401 bp, Homo sapiens
tttcttgtatctctgtcactcacaatattacctaatgctatctaatgtattctgttcttagagaagtaaaatgtctcagtagaccaaacttagatttgatcattacgaaagatgtcattctcagtggctggatcttcatgaggttttcttgagctgtttttcatttcacctgctgctggatgttttaggctgctgtattcrcatctggtggcctgtctcactaggatctcatggctgcccgggcagtgtcacagctctgagttcaggttggctctagtcttgcccttcgctacagaatcgtggaatacagtgggagatgaagaaggcagcactcttgccctttgtgtttctagtaacttaaattcaactcctggcagcctacttcacattctgatttgggc

SEQ ID NO: 414 - DNA, 401 bp, Homo sapiens
acacccatgtaattcacaggcatctgtccacaggtagtttgagaacctaactatattaaatttcaatattcagcaaatagctcataaccaatcatatctgaattagaaaagcatgtgtaaagaacaatagcaccaactagcactcatagcagattattccagctatgttataataaggcccttggcaataactcaaggtckgttttttcaaaatgtaaggattaggtgttcttgaggcaggaaagaaaaacaagactattctttgcagatggagaaaaaaatgaagtagattcactagcagagtcactttcatggaaatttggagctctgctgcacagttttagtgtttaaacaggattggaagtcctttgggatgacattttcaatgctgaaagagaaac

SEQ ID NO: 415 - DNA, 401 bp, Homo sapiens
ctgattttggtaaaactaagcacacaatttaaatttatcttggaaaaccttagtagttattggaattacttgagaatctattgcaagcaatctaaatgaattcttccaaaacatgtcactggagcaggtactcaagaagtaatctgaagtaaacaaacaaaaacaaagctatatttatccttcctcttttctgtgtaatayaatccatgggaagacaagaagaaatttattttctacttgtgagatttggggatgatgatgctttttctatccttatcaccatttgtcaagatacaactttcattactttccagtaccacctttgaacagcatcttcttttttagtatattctcccttcctccttccatctctccattctttcttccctcctcttttcttc

SEQ ID NO: 416 - DNA, 401 bp, Homo sapiens
caggtgctgcaataaattgtttgccctagatcgaggtggggagagagccctcttaggatgagctgtcacacagtaaaagataagatttcctggatcagttttctaaagtgacaggcgtgtcccctaatcgagacagacagtgctccattttgacaaataggccagacttctacgtgtgcatatttgttttgtgtgtgtcasagtgagggtgaggttgaggagtcattctgttcttattggaagtgaatcaggcataaaagtgatagagcgcttgaatgagatgattgcagttgaaagacacagcaattaagcagatttcagactttagagagcatgtcttccgggagctatccacggtactgaactgcttctccctatattgtcctgtaaccccgcaaaac

SEQ ID NO: 417 - DNA, 401 bp, Homo sapiens
atagagcgcttgaatgagatgattgcagttgaaagacacagcaattaagcagatttcagactttagagagcatgtcttccgggagctatccacggtactgaactgcttctccctatattgtcctgtaaccccgcaaaacaaaccttcaaacattttaaaaccacaagacattttaaaaactggctttggttattccttackagacaaattctctaacctgtgtatttctaatacttgttatttgtttaatcttggctaggtcarcccatttttttttgtttgatattacacattcatccatttatttattcaacaaatatgtaggtacaatcttccgtatgttgggcagcctcctagtggttaaggtgcttaggtttcttattatgtaatgctaattatta

SEQ ID NO: 418 - DNA, 401 bp, Homo sapiens
tagagagcatgtcttccgggagctatccacggtactgaactgcttctccctatattgtcctgtaaccccgcaaaacaaaccttcaaacattttaaaaccacaagacattttaaaaactggctttggttattccttackagacaaattctctaacctgtgtatttctaatacttgttatttgtttaatcttggctaggtcarcccatttttttttgtttgatattacacattcatccatttatttattcaacaaatatgtaggtacaatcttccgtatgttgggcagcctcctagtggttaaggtgcttaggtttcttattatgtaatgctaattattattacttttgatttttctgggatttactctaaggaagcagatttaatgattaaaataattctac

SEQ ID NO: 419 - DNA, 401 bp, Homo sapiens
tggaggataagctcctttcctagagatacttactctacttttggtcatggaccaaatttggagttattcctgtggatttttttctcttgttccttaaggcagtgatagatgcttgtttagtcaccataagttgtgagaatatgtggtctcaataaagacccagcaataccttgtttttctactcattatccagccccaaartttaagatctaaatgtttcctggtgagaatacaaagaaaagtgagctcttatagcctgttgatgggaatgtaaattagtgcagccattatggaaaatagtagagaggcttctcaaaaggctaaaaatagaactaccatatgatccaacaattgcactattgggtatttatccaaaggaaacaaattcaggatattgaaga

SEQ ID NO: 420 - DNA, 401 bp, Homo sapiens
cactgattttaacacacattggaaatatgcataggcaaaccccaaacaactttttattcaatagtgtccatgtatctctaaacttttgatagaaatttgttccaataatggggttactacataagttgaagaaagtcaaactgaagcaaaatttgaaggcttctatattaatgatcagttttaggcgatacttgccaaaayctagttcaggattagaataggctgtgttgacattttaagtgagacatatcagttactctttttcagaaagttaaaataaattctcataatgaaaaaataaatgataattttagattcttttagagaatttactacctttacaaattaggaaaataatattcacagtatccatgattccaaccagttaacatgttggtata

SEQ ID NO: 421 - DNA, 401 bp, Homo sapiens
agctgggactacaggcacctgacaccacgcccgccaatttttttgtattttttttttttagtagagacggggtttcaccgtgttagccaggatggtctcgatctcctgacctcgtgatccacctgcctcggcctcccaaagtgctggggttacaagtgtgagccaccgttcccggcctctccagtgtcctatctcaattcytattcaattgtttgttaactagattggaatcatactgtgcatattgttttataatttgctgttttggctgacatttggaaaaattattttagaaaaaacagccagttttgtagatgaaatggtgttttgtttctattgatttttgatttttaagttgctattacttcatgaagttagcgtctttcttgtgtattggctat

SEQ ID NO: 422 - DNA, 401 bp, Homo sapiens
actggaaaactaattgttcagcatcctaagtgtatttgttgcttaattatatatataatttctacaacaagtggaatgatttacatgaatgtcaaataactggtttataaatgaaacctgatattaagctaaataaaatattggcatatagtgttcacttatgagctaatattcttacctctagcttcatttacaaattarttatgctacaaatatattaatgttccacaactctttcacacttccatcaatatcgagtttattccattacaatgtgaaattaaaaaaaactgtagaataattacttctgcttcagaaaatatagattacctatcttccagtaagatgctgcaatttatttagataactgcatttattgcattgattttgaaaaattgctc

SEQ ID NO: 423 - DNA, 401 bp, Homo sapiens
ttaatatacattaagagttttatttttggaacaacttagtaatttttagaaacttgagtacaagtgttggcaaaggttctataaaattctgtctacagaatatgtggaacacaaccttgggtcgtatctccaaggaaaactaccatgattaaaaagacaatgctttgtcaaattcacttgttatcacaatctaattgtgtwaaatgccggccacattytgagtagacactttaacttggcttyccttgggaaataggaaatgaagggcccgaaagaactagaagctgcctctcaattttytttcaacatggcaaaagcatttgcatttatctgtgcccctctcttggctacactctcagctttgatacactacttgagcatgtggaggtttacctactgaa

SEQ ID NO: 424 - DNA, 401 bp, Homo sapiens
ttttatttttggaacaacttagtaatttttagaaacttgagtacaagtgttggcaaaggttctataaaattctgtctacagaatatgtggaacacaaccttgggtcgtatctccaaggaaaactaccatgattaaaaagacaatgctttgtcaaattcacttgttatcacaatctaattgtgtwaaatgccggccacattytgagtagacactttaacttggcttyccttgggaaataggaaatgaagggcccgaaagaactagaagctgcctctcaattttytttcaacatggcaaaagcatttgcatttatctgtgcccctctcttggctacactctcagctttgatacactacttgagcatgtggaggtttacctactgaatgtgacccttatatgaa

SEQ ID NO: 425 - DNA, 401 bp, Homo sapiens
tttttagaaacttgagtacaagtgttggcaaaggttctataaaattctgtctacagaatatgtggaacacaaccttgggtcgtatctccaaggaaaactaccatgattaaaaagacaatgctttgtcaaattcacttgttatcacaatctaattgtgtwaaatgccggccacattytgagtagacactttaacttggcttyccttgggaaataggaaatgaagggcccgaaagaactagaagctgcctctcaattttytttcaacatggcaaaagcatttgcatttatctgtgcccctctcttggctacactctcagctttgatacactacttgagcatgtggaggtttacctactgaatgtgacccttatatgaataatatgagacttttgtatcaacag

SEQ ID NO: 426 - DNA, 401 bp, Homo sapiens
atatgtggaacacaaccttgggtcgtatctccaaggaaaactaccatgattaaaaagacaatgctttgtcaaattcacttgttatcacaatctaattgtgtwaaatgccggccacattytgagtagacactttaacttggcttyccttgggaaataggaaatgaagggcccgaaagaactagaagctgcctctcaattttytttcaacatggcaaaagcatttgcatttatctgtgcccctctcttggctacactctcagctttgatacactacttgagcatgtggaggtttacctactgaatgtgacccttatatgaataatatgagacttttgtatcaacagtagtgatggtttttgtttttaagtcacattttattgtatgtcttctctacctctcac

SEQ ID NO: 427 - DNA, 401 bp, Homo sapiens
cgttatatggaaatgtgacatgttttagatttgtgtaagctcatgtacttgaaaatcagacttgtctaaaatttcttttgtaagatattagagaacttttgaattatacctcttatttttgaatgtacattcctcagagaatcatctttatgcacaaataatgtttattttatatttttaatctactttagcagacccacstgattcttctacatgtaaggttgaaacagttttgagtgataaagaactgattttatggagcaactaatgattttgctgttgctacttttgtgccagcaaatacgtaatccacaagaatgttataagaaagatatttatcaagcctctaaaaaaraagaaagtaatcaaaagataaggatgcataaatatcttaagactac

SEQ ID NO: 428 - DNA, 401 bp, Homo sapiens
caaataatgtttattttatatttttaatctactttagcagacccacstgattcttctacatgtaaggttgaaacagttttgagtgataaagaactgattttatggagcaactaatgattttgctgttgctacttttgtgccagcaaatacgtaatccacaagaatgttataagaaagatatttatcaagcctctaaaaaaraagaaagtaatcaaaagataaggatgcataaatatcttaagactactcatgacatcaaggaaggtgaatcagtattaataattcactagtttgtgcatacttattgtcaggtgctgggtcaaattaaattggaatgatttgttgacatgaggatttctgggttcatgatggattcacattaaaacaatttttatgtttta

SEQ ID NO: 429 - DNA, 401 bp, Homo sapiens
caaattaaattggaatgatttgttgacatgaggatttctgggttcatgatggattcacattaaaacaatttttatgttttaagccttctcccatcaaataggttttacggtcttgtgtacacattacatgagggaaatagtactttaacattttacatgctggtgtatagtctatatcagcagtccccaacctttttggcwccaggaaccagtatcatggaaggtaattttgccatggagtggggttggggaaaggagatggtttagggatgaaaccgttccacctcagatatcaggcattacattctcataagaagcatgcaacctagatccctcaaatgtgcagttcacaatagggttcgtgctcctatgagaatctaatgctgccactgatttaacag

SEQ ID NO: 430 - DNA, 401 bp, Homo sapiens
agcagtttataaatggaagaaatggctttacatatcttgtttcctgaatccctttggatattttaaaagaggtgattaaagtaaatttatgtttctgcagatgcatgtaaagctaattgttttaataacagtataattggcgaaaggaagttatgtgtaataagaaacaaagcgtaccacttccaaaatattcacattagrcatttgttaaatttgcagtgagtttcagcatacacacatacacaacacagaccatatgtgaacattaggaagattgatttgtttaaaaaatccacttctacaccacataagtaatatttcttactgagagtcactgaagtgaggaagaaaaataaccacataaygggaaaagaaaaacattaaatttagttatattgtat

SEQ ID NO: 431 - DNA, 401 bp, Homo sapiens
aaacaaagcgtaccacttccaaaatattcacattagrcatttgttaaatttgcagtgagtttcagcatacacacatacacaacacagaccatatgtgaacattaggaagattgatttgtttaaaaaatccacttctacaccacataagtaatatttcttactgagagtcactgaagtgaggaagaaaaataaccacataaygggaaaagaaaaacattaaatttagttatattgtatatgttttgtgtttattagtttttattaattgtaggcatgcaggtaaaaaaatcgcctcatttgaaaattaataacccagggcacaaactattaattaaggcatatagcaaatgccttttaaaagtattttatactggctgggcatggtggctccgcctgtaatc

SEQ ID NO: 432 - DNA, 401 bp, Homo sapiens
atgaccatacgtaggaacctgcttcttctcttgaaatggctgttttgttttatggagattggctagactggcaggtgacaaggcaagaggtgggctggccacgagagccagctgagcagtgcgagttggtgtgattcagccatttgtcaccaccatattctgccatagatagatattttctattcgagaaagtggatcaamtttcactgtacaccactttctcactakgstagaaatacatgaatggtggggcatagttcactccaaatmtgatccatctaaacttttctttctggtgagttgatctgttttgagattttacactttacataaaaatagtatagcagccactctttgccagtcacaaaccacctttagctgagagtattatcatatcaatt

SEQ ID NO: 433 - DNA, 401 bp, Homo sapiens
ctcttgaaatggctgttttgttttatggagattggctagactggcaggtgacaaggcaagaggtgggctggccacgagagccagctgagcagtgcgagttggtgtgattcagccatttgtcaccaccatattctgccatagatagatattttctattcgagaaagtggatcaamtttcactgtacaccactttctcactakgstagaaatacatgaatggtggggcatagttcactccaaatmtgatccatctaaacttttctttctggtgagttgatctgttttgagattttacactttacataaaaatagtatagcagccactctttgccagtcacaaaccacctttagctgagagtattatcatatcaattgtttcaaggaaatgacaaatgagtagt

SEQ ID NO: 434 - DNA, 401 bp, Homo sapiens
cttgaaatggctgttttgttttatggagattggctagactggcaggtgacaaggcaagaggtgggctggccacgagagccagctgagcagtgcgagttggtgtgattcagccatttgtcaccaccatattctgccatagatagatattttctattcgagaaagtggatcaamtttcactgtacaccactttctcactakgstagaaatacatgaatggtggggcatagttcactccaaatmtgatccatctaaacttttctttctggtgagttgatctgttttgagattttacactttacataaaaatagtatagcagccactctttgccagtcacaaaccacctttagctgagagtattatcatatcaattgtttcaaggaaatgacaaatgagtagtta

SEQ ID NO: 435 - DNA, 401 bp, Homo sapiens
ggcaggtgacaaggcaagaggtgggctggccacgagagccagctgagcagtgcgagttggtgtgattcagccatttgtcaccaccatattctgccatagatagatattttctattcgagaaagtggatcaamtttcactgtacaccactttctcactakgstagaaatacatgaatggtggggcatagttcactccaaatmtgatccatctaaacttttctttctggtgagttgatctgttttgagattttacactttacataaaaatagtatagcagccactctttgccagtcacaaaccacctttagctgagagtattatcatatcaattgtttcaaggaaatgacaaatgagtagttaccaaaaaaagaatgaatgaatgaataaataaataaacaca

SEQ ID NO: 436 - DNA, 401 bp, Homo sapiens
tatgcccagtaaatttttcataatttgtagagacagagtttcgccatgttgtccaggctggtctcaaactcctggactcaagcagtctgcccaccaaagcctcccaaagtgctgggattacaggcatgagccatcgtgcccaaccatagattttttttttcataatggcagagaatggctgcaatttagggtctttcttargttcttcctcatccatttcttgcagaaaatttagtactttgtatttctttcaataatttcaacaattttatcctgacttttcccagagcaaaaattaggatggggatgttagagcttcctttgagcaggctatcatcgcaatgaaatcttgaccttgccccttgtagttgcctattgctttataaaacttgttattgaaa

SEQ ID NO: 437 - DNA, 401 bp, Homo sapiens
ctcaggagttcaagaccagcctgggcatcaacacaagaccttgtctctactaaaataattttctaagaatagctggatatggtggtgtatgcctgcagtccctgctgctctggaggctgaggtgagaggattgcttgagcccaggagactgaagcttcagtaggctatgatcacatcactacactccagtctgtgtaacaraatgagatcctgtctcaaaaaatttaaaaaataaaatgaaaaagaagatgctacgtacattatacacatataaattagtaaccaaatggtttaacaacctcagtgattgtgttgttctgtagtttgatgacttttatcttgctccttctcattgccattgattgtaccaggttatttcctggagcatgttgtatatcaag

SEQ ID NO: 438 - DNA, 401 bp, Homo sapiens
tttacataaacagatatgccaatctttccttttatagcttctggttttttgagtcaaaaattgagagaccttcctcattctgagagtataaaatagtaattatttttaattttaattaatttatttttattgacacctaataattttgcatgtttatggtttaccatgtgatgtcctaatacatgtacatattgtgaaatratcaaatcatggtaattagcatatcaatcaccttaaacatttatcattcctttgttgtgagaacatccaaaattctctcttctggctgcttgttggcagtagtcaccttactgttcaacagagtactagaacttattcctttctatgtaactatatctgctgaccaacctcttcccatctcccactccctcctattctcc

SEQ ID NO: 439 - DNA, 401 bp, Homo sapiens
atgactggtttatttcatttatcataatgtcctctagcctcattcacattgttgcaaatggcaggattttatcctttttgtggctgaatagtattccattgtgtatatgtactgtgttttctttatccattcatcccctgatggacacttaggtggattctgtatttcactattgaaaatactgctgcaataacatgagcrtgcagatgtctcttctatatactgatttcctttcctttggatatatacccagtaatgggattgctggttcatatatttttaacattttgaggagcttccatactgttttccacaatggtagtactgatttacattcccacgagcagtgtataggagttccctttcctttacatcctcgccagcataataacgattttaat

SEQ ID NO: 440 - DNA, 401 bp, Homo sapiens
aataacagctaatgttcattgagtgctaatcttccaggtactgttcaaagagttttacctattatcaactcaattctcccaacagccatatgatgttgttactgttattatagataaagccacttaggcacaaagagattaagcaactagttcattgttacagagttggaaatggaaagccaggtcctaacccaaatgctstgttgcgcacttctctgctgtctgcaggtgggatgagaggtgggtgctgagctgcctcctgtggtgctgttttgaaacctgcccatcccaaagctaagggagtatcgctgtgctaaagggttcagtcagcagccttgccagttcggaatcccctagaaccaccctccatgcatgtcatgggcagctctctgagatttctg

SEQ ID NO: 441 - DNA, 401 bp, Homo sapiens
ttaccttataacttgatttcagaatatagttacacaaagtgagaataactcgatgaggatgctgtttggatcttgagtactgtaagtcctgtggtttaattgacgagttgatggatttcttttatgcctaaattcaggctgaaaggcctaaaggccacacgaggcagtttatcacgagcgctattctccgtttttatattmtggttcattaccagccccttcctcagtacttctatttatataatgttgttctggtcaaggtttatactaaatctcttttaacttcaacatccaacaaatatttttaaggactaatgtgtgcaaaacattatgctaggtgtttcctaaggcttcaaataacttggatgccagttttggactgtaagtgctcacaggataat

SEQ ID NO: 442 - DNA, 401 bp, Homo sapiens
gaaacagatccctatgccaaaaagttggggattgcagctttaatagactcagaggcatagtcttagagtgtaacaaatgcacaaaccttttcttttaaaacagactccagagggattgaagagagggaaccagtgataatctatatgcccatttcatggcagacatgctgctgtgtgctttccatgcattatatcattcakccaacaggcatctaaagaatatagagtcaagaacagttaagccattgccacaagatcacctagctagtaaatggctcaaactcagtgactcaaacccaggatttccaaccttaaataaggctctcactcccacaccgcacagctgcatatctgagtgtttatcagtgaattacattgatgtaaattcatttatgaaaatg

SEQ ID NO: 443 - DNA, 401 bp, Homo sapiens
tcttgaggcttctgcattcttcacgtagttctcgagccttggtttttagctccatcagctcctttaagcacttctctgtattggttattctagttatacattcttctaaatgtttttcaatgttttcaacttctttgcctttgatttgaatgtcctcccgtagctcggagtaatttgattgtctgaagccttcttctctcmgctcgtcaaagtcattctccatccagctttgttccgttgctggtgaggaactgcgttcctttggaggaggagagtcgctctgctttttagagtttccagtttttctgctctgttttttccccatctttgtggttttatctacttttggtctttgatgatggtgatgtacagatgggtttttggtgtggatgtcctttctg

SEQ ID NO: 444 - DNA, 401 bp, Homo sapiens
ccccctgctttgtttacctaagcaagcctgggcaatggcgggcgcccctcccccagcctgctgccgccttgcagtttgatctcagactgctgtgctagcaatcagcaagactccgtgggtgtaggaccctctgagccaggtgcgggatataatctcctgatgcgctgttttttaagccggttggaaaagcgcagtattcakgtgggagtgacccgattttccaggtgccgtctgtcacccctttctttgactaggaaagggaactccctgaccccttgggcttcccgagtgaggcaatgcctcgccctgctttggctcgcgcagggtatgcgcacccactgacctgcgcccactgtctggcactccctagtgagatgaacccggtacctcagatggaaatg

SEQ ID NO: 445 - DNA, 401 bp, Homo sapiens
tcaaagtcaaatggaacctggaaaatcgaacttaattccattttacatttttcccttgaccatttcccatggtggggaggtatgtgtctagatttggaaaataagcctgcttagttttttttcccagctcagtgcttagaaacaaccccctctagcaaaaccatgcctaggaaaacaaagtatccagctaggctttcaagrttacttgggggcaagacatggatagttacgtccttggaggaaaataaatacaaggcagtagatccaaatgtatttgtcatgcaaagaacattagctgagagagagcttccatatataggtttgcaaaactgagagcaaagccaaagccattcctgggttttgctttgtgatatagtctccaaatggatactattatgatt

SEQ ID NO: 446 - DNA, 401 bp, Homo sapiens
aaagcagtcattcaatcactcagtaatttttagggatttttaaaatagatataacaattttaggatgtcaagttttagatgtctagttttaacttgtttggttgagctgacatttaagttcagtcccaatgtgatgtgaatggacctagccttttacctcttctttttttcctcttcattggaaaccagtacagagaacayggtcacttaataagaaagatgtttcctgctttgtttccttttattcaactcagaactgcctgggggaaaagattgcttcctttctgaatgtggtaagccacaaaatggaaaatgtgcacacgagctctttcctattaaccttggggaaaggtgacagaaatgtgtgaacaatgctgttagctgtttaaatgttcttttat

SEQ ID NO: 447 - DNA, 401 bp, Homo sapiens
taaaagataatttggccaactgtattggaccaactgctcttgaactctctaagtacaattggtttaagatattgcctgaaatgactattttgcttatggtgtcattctttcatggtcaagatgacagttctctaggaatgttatttcatttctagaatgtcagccaaacagctttttatgatcctgagcagttatactctwmcatcccaaacacacacacacacacatacatcttacacacacacacacacacacacacacacacacacacacacacacacaaataagccctgagaattttcagagaaattcatggtggaagatctgagattagaacccaggaactcctaagattccttggttttgtatcaaaggtcaataaagagacatgaagtcaatga

SEQ ID NO: 448 - DNA, 401 bp, Homo sapiens
aaaagataatttggccaactgtattggaccaactgctcttgaactctctaagtacaattggtttaagatattgcctgaaatgactattttgcttatggtgtcattctttcatggtcaagatgacagttctctaggaatgttatttcatttctagaatgtcagccaaacagctttttatgatcctgagcagttatactctwmcatcccaaacacacacacacacacatacatcttacacacacacacacacacacacacacacacacacacacacacacacaaataagccctgagaattttcagagaaattcatggtggaagatctgagattagaacccaggaactcctaagattccttggttttgtatcaaaggtcaataaagagacatgaagtcaatgaa

SEQ ID NO: 449 - DNA, 401 bp, Homo sapiens
tgatctcctgacctcgtgatccacccgccttggcctcccaaagtgctgggattacaggtgtgagctactgtgcccgtccttgttttccttttgtcaagaaagccagacattctgtgacacggtaaatgaaaaagggcttggacccaaccccagctctgttgcttgcttgttgcgttgccataagagaccctcaagaagaayctcacaaaatccactgccctcccttagtctcgctttcccactaaatcgctccatgcaaggggagccatttatattgcattaaacttttctcggtgttctctaattccaggggttcttactgcctgagagggtcactccaccatgtgggtaagcggggtgtccagagtctgcccataggccatcagcatcagtttttcaaa

SEQ ID NO: 450 - DNA, 401 bp, Homo sapiens
tggattttgatgtaggttagagactgtttataatcatcggagcctagattttattttacttaaatcgcagagtactgtttttgctattttaatatgctgtaagttttcccagaaaacaacttgtataaattgacaaaacttattttgttcagaatttttccaggagatgctcaatatttcagaaaacgacctatctaaagrcaatagtgtttgtggcatttaagatagaaataaagtacaaaccgtcagtctgcatgcaaactgtagttactgtattctcacgattctaattatgggtgcaggcacccaggactttgctatgttttcaaatatagtttttttctattgctatatatggaaattcttataattttattctgaattaataaccttacatcttt

SEQ ID NO: 451 - DNA, 401 bp, Homo sapiens
catgaaagtggcatcctgttggcggagcttgcagtgagccgagatcgcgctactgcactccagcctgggcgacagagcaagactccatctcaagaaaaaaaaaacaaacaaacaaaaaaaggaagtggcatcccattatctttgctgtattccattggtgacaagtaaggtatagattccacatgtactcaaggggcacgyattacacaagggatgaccactcacctgcaaggataattgaggaacattttcgattctgttcaacacagccaatttcctatagcagtgttaggtggaggggatgagttattgggatcagaaggtagctagtgtgttctgtagtctttattccaatgaaagataactttacccattaatgtgaagtcaattgtactcagaga

SEQ ID NO: 452 - DNA, 401 bp, Homo sapiens
gatccagggtcagatctggaagaggtagagagcatttttttaattccttatttaaaaaatgtgatttttgtgggtcatgtgaaggtttgttataaagataaacacgtcatgggggtttgttgtacatattattacatcattgaggtattaagctcagtacctggtagttatcttttctgctccgcttccctcctcctaccstccaccctcaagtagacctgagtgtctgttgtttccttctttgtgttcctaagttcttatcatttacttccctcttataagtaagaacatgcagtatttggttttctgtttctgcattagtttgctaaggatgatggcctccagctccatccatattcccacaaaatatatgattgtgttcttttttatggatgcatact

SEQ ID NO: 453 - DNA, 401 bp, Homo sapiens
ctgagagcatttaagagtcaaatgtattcatgacataaatgtgtattgaaaatctgatatgttttagtgattgttttatagggagggggcagagactctgcttttatgaagcttacagtgagtgccagccaccattttagcttttgggggccttctctaagaagggtggagtagttaatgtagacaaacatgggttttggmagcatacgaccatgaattaacattatatttccgcttaccagccgtgtgattttagcttacgaaagctactctctggttgtttatttcttcaagtgaagaaatgggtctaatagtacctatcacacaagattttctgtgaagattttgtgagatcctrtatattaagcacccagtgcataggtgttctcaatgttaaatcc

SEQ ID NO: 454 - DNA, 401 bp, Homo sapiens
taagaagggtggagtagttaatgtagacaaacatgggttttggmagcatacgaccatgaattaacattatatttccgcttaccagccgtgtgattttagcttacgaaagctactctctggttgtttatttcttcaagtgaagaaatgggtctaatagtacctatcacacaagattttctgtgaagattttgtgagatcctrtatattaagcacccagtgcataggtgttctcaatgttaaatcccctctccatgtctgaaccttcaataaaacagactattacaaattacatatgaagactttgatgtttaacgtcatccacacaaagttaggcaaaagtcatatataacaaatatttaagtaatcacctggaacaagatctctttagttattttttaaat

SEQ ID NO: 455 - DNA, 401 bp, Homo sapiens
agtcagcagccatcaacatcaagggaagaccctccaccagcaaaaagattatgactttctgaagattcagatgatcattagcatttttagcaataatgtatttacaaattaaggtatgtacatttttcagatatgttattgcacacttaatagactacagtatagtacaacttttgtatgcactgggaaaccaaaaaattyaggtgacttgctttattatgatgttcactttattattcagttcactagaactgaacctgtaatatccctaaggtatgcctatgcttgaaaaatgttatcagtaagatgtgtaatgtgtgacaaatccagataatacattacttttggagaagctgagctgtttcaaaagtgttccttttatttgaagaagaagcagagta

SEQ ID NO: 456 - DNA, 401 bp, Homo sapiens
tgtgtgacaaatccagataatacattacttttggagaagctgagctgtttcaaaagtgttccttttatttgaagaagaagcagagtagcccaatcaagtaattttatttattttgaacttacacaataatttacgcttttgtttttcagcaagtagtaagggaggtgggttaatctgaaatgaaatgttcttagatcctgytgttcagttggttggagggcattaaagatagttattacttaagatctctgttgttttgaaattcccattttcctctgacctaaattctatgatgtaaaagaatcccagccaccacagatagactgtttttccttatttaaatgctttaaaatttagttttgacggaatggtctcttaatagaattcttgtgattctgtaa

SEQ ID NO: 457 - DNA, 401 bp, Homo sapiens
taaatcctgggaaaaatgaaaagagtcttccttatgcagttgtgttttgctgctgagttgtgtttgcagtgtattagaagaaatacatgtaggaagcctgttttcagtacaccactgtattactccatggtcttgaatttctgaggtcttaaaatagggttattaatattacggagaaagtcacactgctgggtaatctgrttgaaatggagacagagcataaaccaatagaggtgtacacatatactaagaattttgactggttaagggaaacaagaaacaaatgtatttgttttcattagtaaatatgattttttctcaggatatgagtaagaattagtgaagagggaacaatattaaattattttccttagtaaggtaggatattaaaaattaatccc

SEQ ID NO: 458 - DNA, 401 bp, Homo sapiens
ccatggaaatggcagtaaagacagaacaaagagaatacatttctgaatatactgaggaacatatactccagagagcagaaacaggaagaggggcctctgctaaagctgaaggagtcttcaggagggaacccagctgggctctgtgttctggttggcagatacagagagtagccaaggtcaaaagcagacaaacagaaagtkaggtgattggccacaggtttggaaatggctcaggtttgctctttccaaccccttgcatgtcactgcacatttacctccagaagtaaagcaggagaactctgcaaagggaaccaacamtctgcatgggagggcattgcctccaagtgtgtgggctggcgaccaagtgcagccctctgccctagttatgggagttggagagg

SEQ ID NO: 459 - DNA, 401 bp, Homo sapiens
tcaggagggaacccagctgggctctgtgttctggttggcagatacagagagtagccaaggtcaaaagcagacaaacagaaagtkaggtgattggccacaggtttggaaatggctcaggtttgctctttccaaccccttgcatgtcactgcacatttacctccagaagtaaagcaggagaactctgcaaagggaaccaacamtctgcatgggagggcattgcctccaagtgtgtgggctggcgaccaagtgcagccctctgccctagttatgggagttggagagggacttactggtttgcatgttccatgcaagagctaaagcaaagcacatctcggagaagtgagccaggaaagtggatcaatccatgccaacaacctatattaattaacctgataattaa

SEQ ID NO: 460 - DNA, 401 bp, Homo sapiens
gtacctataaaaccttttagaaaaaaacaggagagtgtctttcagatctaaggtgagccaaataatgggtcgacttgatactgagatcacaacttataaatggaaatgttgataatttggactttgtaaaattaaaaacctttgccctgcaaaagaccctttaaaaggatggaaagacaagctacagattgggagaaaatrtttacaaaccaaatacttgatctaggactagtaactcaaaagtcaacagtaaaaaattttagtaacaatctattttagaaaatgaacaaaagacacaaagagatatttcaccaaagaggatatacatttggtgaaaaagcacatgaaaagatgttcaaggtcattaaccattaagaaaatgcaaattaaaactacaatga

SEQ ID NO: 461 - DNA, 401 bp, Homo sapiens
aaaagcacatgaaaagatgttcaaggtcattaaccattaagaaaatgcaaattaaaactacaatgaggtatcactatccaactatcaaaatggctaaaataaaaagattagtgacgagaccaatcgctggcaaagatgcggagaaactggattactcattcattgctgctgggaatgtaaaatagtacagcccatactagraaagagttcaatttcataaattaaacatacaactaccatatgacccagcaattgcattcctaggcttttctcatagagaagtgaaaacttgtgttcacatagaaacctgtacgctaatgttgaatgttcacagcaactttatttgtaatagctgcaaactggaaacatctccagtgtccactaatgggtgcatggttaaa

SEQ ID NO: 462 - DNA, 401 bp, Homo sapiens
tccactaatgggtgcatggttaaacacattgtgatacatccataccatggaatagtattcagcaataaaatagaacaggcatgcaatggaaagttacatgcaacagcctggatgaatttccagagaaatatgctgagtgagaaaggccaatctcaaaaaattacataatgtatgatctaatttttataccactttgaaacmataaaattaaatgaagaacagattagtggttgccaggggttaagtaaagtgggaggaaagtggttgtggctataaaagtgccacatgaggaatgcttgtaatgatggaattgtctgtttcttgactatgagtgtcaatatcctgaatgtgatattgtgagatgttaccatgggggcaactgggtaaagggcaaatggaat

SEQ ID NO: 463 - DNA, 401 bp, Homo sapiens
ttgaaataacaatttcagaaggatcagcataatgaatctaccagtcactgaaaactctcaattatctgtcttgtcttccctttcagtttttgtttcatttctgttttagtaacctcttagaaaaaggtagtattaaaggagacctaggtctcttttaccaatttaggataacttcacaatctccgcagataaattggtatstgtgtacacacacaaaaataggaaattcttgtgagtagtttacaggggaagtgcttaatatataaacaaggcagtgctctggtaaaattacttattgcattgagattaagaacataataaaattattaaaatagcctaccactttcattacagacttaaaatgttcttccttttatctctgggggttkgataatccctgt

SEQ ID NO: 464 - DNA, 401 bp, Homo sapiens
ataaattggtatstgtgtacacacacaaaaataggaaattcttgtgagtagtttacaggggaagtgcttaatatataaacaaggcagtgctctggtaaaattacttattgcattgagattaagaacataataaaattattaaaatagcctaccactttcattacagacttaaaatgttcttccttttatctctgggggttkgataatccctgtttattgttcttttattttgctgtatatcacgttggccatttaatcattggctctttagcagggtgggtgtagagagcattaaaaaataataaatgatgcagtttatcatcacctccctgtaaaacacaaggcacgtgaaggatatgagtttcctttaagctaacgtatttacttaatgtgatttcaaa

SEQ ID NO: 465 - DNA, 401 bp, Homo sapiens
gtgaaggaaatcagttaaagcattcaaataaagagaaaaatgtaaagagaaacattagtatatttgctatataaatggtaaacgttttatatgtcaaaaatcatttgtatattaaatatttatattaatctgtcatatgtggtagatgattaatatacctagcatataacatgctcatataaataataaaaaaatcataasagaaaacaagacaaaagccrtatatgtagataattcatcaaatggaaaattataaataagcaaattttgaaggaaaataaaataatatgttctatgattaaagtggtcaatgtcttttaaaggctaatattaatagctgacttgtggtctgtaaagaatagtttatttaacatgtgacttataaaaatatataacacttt

SEQ ID NO: 466 - DNA, 401 bp, Homo sapiens
cattcaaataaagagaaaaatgtaaagagaaacattagtatatttgctatataaatggtaaacgttttatatgtcaaaaatcatttgtatattaaatatttatattaatctgtcatatgtggtagatgattaatatacctagcatataacatgctcatataaataataaaaaaatcataasagaaaacaagacaaaagccrtatatgtagataattcatcaaatggaaaattataaataagcaaattttgaaggaaaataaaataatatgttctatgattaaagtggtcaatgtcttttaaaggctaatattaatagctgacttgtggtctgtaaagaatagtttatttaacatgtgacttataaaaatatataacacttttggacagcatttttagagat

SEQ ID NO: 467 - DNA, 401 bp, Homo sapiens
atgcagatcattgttattctataaaatgcagtaccattcagtcattcaaaaatacatttccaaaaaatgtttagagaaaatgctaaaattatgctaagtgaaaattcagacaatatttaaaattttaatagtctgacagattctgatatagataaacagaaagaaagaaaggtaatgtaattttcatgtaattgtacccawgtatatggggaaaaaaggcttgaaggcagtatacaacaaaatgttaaggacttgttatttgcatctactatttcaagaattccttctgaatataaccaacagtttatgcacaaagaatttaattgcaatattcttaataacggtgaaagtcaaatattcatcaataggtaagtgtttaaattacattatcaaatactcrg

SEQ ID NO: 468 - DNA, 401 bp, Homo sapiens
awgtatatggggaaaaaaggcttgaaggcagtatacaacaaaatgttaaggacttgttatttgcatctactatttcaagaattccttctgaatataaccaacagtttatgcacaaagaatttaattgcaatattcttaataacggtgaaagtcaaatattcatcaataggtaagtgtttaaattacattatcaaatactcrgatgatakaattctatgcaggcattataattatgtctttgaagtgtttctgttttaataatatgtaaaagtgcttatgatataatgctaagtaattaaaccatatgaatgtatgttaaaaggctgcatgaaaatatggtaaattgtttgcataggttatcattgagtagtgaaatcataattgctatttctttctttttt

SEQ ID NO: 469 - DNA, 401 bp, Homo sapiens
ggggaaaaaaggcttgaaggcagtatacaacaaaatgttaaggacttgttatttgcatctactatttcaagaattccttctgaatataaccaacagtttatgcacaaagaatttaattgcaatattcttaataacggtgaaagtcaaatattcatcaataggtaagtgtttaaattacattatcaaatactcrgatgatakaattctatgcaggcattataattatgtctttgaagtgtttctgttttaataatatgtaaaagtgcttatgatataatgctaagtaattaaaccatatgaatgtatgttaaaaggctgcatgaaaatatggtaaattgtttgcataggttatcattgagtagtgaaatcataattgctatttctttcttttttcttttttt

SEQ ID NO: 470 - DNA, 401 bp, Homo sapiens
gtaattaaaccatatgaatgtatgttaaaaggctgcatgaaaatatggtaaattgtttgcataggttatcattgagtagtgaaatcataattgctatttctttcttttttctttttttttttttttgagatggagtctcgctctgtcgcccaggctggagtgcagtggtgcgatcttggctcactgcgagctccgcctccygggttcacgccattctcctgcctcagcctcctgagtagctgggactacaggtgcccaccaccacgcccggctaattttttgtatttttagtagagacggagtttcactgtgttagccgggatggtctcgatctcctgacctcgtgatccgcctgcctaagcctgccaaagtgctgggattacaggcgtgagccaccgcac

SEQ ID NO: 471 - DNA, 401 bp, Homo sapiens
tttgttgatggtaaaattctgcctttgcatctgaaattggaaactcttctaatcctggagtctgagtgtaattaatcggaaggctttctcttatctgtgtctaggatcagcctttagtctgatcttcatttttatccaggtgcaaaactcaaatacttttacctttagtgcagtggcccaaattttgtccctagttctgcytgtgctatcattaactgtcattttttaattatatctacacacgaatgtgggccagaggcagcaagatctggattttctcttcctctctgagtccctgacccttggattgttcttccttcttttcaattttggtgggttctgggtttagatttgtagcctaacctagtcaacaacttctttggcatagaaaagaattattt

SEQ ID NO: 472 - DNA, 401 bp, Homo sapiens
agtcaacaacttctttggcatagaaaagaattatttctgatgtgtatattttcccagaagttagaatacccctttgatatatttatttgtgtttaatccacagaaagaatgaagaattaagttatattaacaagagtatcttgcagtatatatatgctttaaagttcacagtgactttgacatgcctctttcatttagttwtcacaactcttggaacgtgtttttgcccattttctgcataagaaaactgaatttcagtaaaattaaattgtttttcccaggcaacccagccaggaatcactagtccccctctctcaaaatccagcatttgctcactagaccagagctgctttaaatgacaatagtgtatggaattcattatagtagaatccattctaaac

SEQ ID NO: 473 - DNA, 401 bp, Homo sapiens
gttgtaacccaaccatgtaaggcacatgttcttaagatctcttgagggatgtgtctcaggctactggtcattcacatttggctcagtctaaatctcttcaaatattaagagtttgactctttgacaactaatacatatatattttaataaccactatgtgccaggaactgtgcttcatatatattattgtgtaattctcaragtaattcccatgacataactatagtacatctgttttaaagatagagaaactgaggctcaaaaagactaagtattttgtaaatattctaagactggaaataatatttgatttcaagattttcttattccaaaatgtgttctgatctgctgctctaccccatctctactaaaaatacaaaaattagctgggtgcagtggtg

SEQ ID NO: 474 - DNA, 401 bp, Homo sapiens
ggtgtgaatcactgtgcccagcttatttattctttctttttttttgtacccattaactatcctacctctctttgtcccaactgcccttttcagcctcttgtaaccatccttctattccctattctcatgagttcaatcattttgatgtttagatcaatatgggacttatatttttaagcattttgatttaattttcatcckttggccaagcttggtgttctgcatttgcaaattttgttagggtacagggtagtcatggctgcaatctggagaaaataatattcaagatagtgttccaggacttattattatcatttcttactggtccattggctgagttggaataccagctaatttattagatataccctatgcttccattgtgcaaacctcagcctata

SEQ ID NO: 475 - DNA, 401 bp, Homo sapiens
aatgaataagaagataataagacgaatggaagactacattctttctactgactggtcatcggtttttctaaatcttggtcctttatctccaatgggtctttgaggacaagcacatcttatgtactttgtaaatatttgctgtttatgcacattttgagtatcattgtttagctttgcttttcagatgcatgaaacaagtamatttgaggcagcaaatgagtaatttgtaaatctagacacaatgagaaggcaattaagaatgctgcttgatgaaaaagaataagagaataatgttgtaggtaagggacaaactaatttcactaatagtggctttatatacagtccagtatgtgaaaatacttaagtaattaacattaacattcacactgtcatcctaggta

SEQ ID NO: 476 - DNA, 401 bp, Homo sapiens
tttctactgaagcccagtaaatggttttgggagacatttgaaatcttagtcatattcaaatcccaaatacaatttctcttttttttcccagaaatttcaaaggttttagaaatattttctactggaaaggtatctctcattcttactcaaaatttagacactaatgagtagatggcaagtcttgtttataagcattaatcrtgaagatgaacatttataactgaaaaaagatgttcgaattttggggtttgtaaaagaactaggaatggagaacatttagagttcactatgtggtgatattcacaaaagcaaatgatgatataactatgtcacttggaaggagcttcaggcaggttctttctcttctacatgtaacatgtaagcctgttttggggtcattg

SEQ ID NO: 477 - DNA, 401 bp, Homo sapiens
ctgtttcccactccatgaaacggaacttattccattcaacttcgtgtaaagtcttttcaaatgacacaactgtaattaggaaagatgtcaataactatttacagatatttatgttgtattcagaactgtactagttagagtgtgtggtttaaaaatttaaaaaaaaagtgggtgagatggtgagacttaactaccctattmcaccactactaggatggtaagaatttagtaagtaaaccagaaagttattagaaaaacaagtaggagcaaaataagctctgtggcattgaactaagaataaaatgtgaagagaaggggtgagctctattatctacttagggatgccttcagtagaaaatgggacttaaaaatgggcaaaacttaggagggtctttccagga

SEQ ID NO: 478 - DNA, 401 bp, Homo sapiens
tacacctggatacaagggaacagtagacactgaggcctactggagggtgggaggaaggtgaggatcaaaaaactacctatcaaatactatgcttatcaactgggtgatgaaataatctgtacaccaaacccccataacatggaatttacctatataacaaacctgcacatgtatccctgaacccaaaataaagtttttttwaaaaaaaataagatcatctagacttgggtaggtggccattgtggacatcatacaagcagaagaagctgatctatggagaagacccataggacagtagtattgagaaagcatagagtcccagagagagacaatccagtttccacagccttgactaatattattgctttataattctgtaaaatttcctctgaagccttcca

SEQ ID NO: 479 - DNA, 401 bp, Homo sapiens
gaaataaaatgaagccacaatctcagtctatgaaaaagagataagttaggataaaactacagcaaaaaatgtacaggaaaagaatgctgctctttaggagagaaatcagaaaagtcagaagataaaatacagagcaaaaagtttactgatcccaacagagaaacaagaaacctcagagcacttatatgcaaagtatttgcrgtgttttggggcccactgactgtaagggaaaccaggtatacacagctttagggcacaatggagagaaagctcttgatatactctcctgagtctcataaacagcaacatcctccaacgtaaatgacagtgaaagaatatgatgaactcctgatgggtrgatgccacaggaggatccagccttatttttcctcagctctttc

SEQ ID NO: 480 - DNA, 401 bp, Homo sapiens
gagaaacaagaaacctcagagcacttatatgcaaagtatttgcrgtgttttggggcccactgactgtaagggaaaccaggtatacacagctttagggcacaatggagagaaagctcttgatatactctcctgagtctcataaacagcaacatcctccaacgtaaatgacagtgaaagaatatgatgaactcctgatgggtrgatgccacaggaggatccagccttatttttcctcagctctttcctcaaggaaaagactgggaattgataatactaaattgacaagtccaaataagccttcaggcaaagcagatgatccttttttttttttttttttaagtatccaaaccagtctcagatttcttcagccagaaagcatgtttttgcaggctttttacaaa

SEQ ID NO: 481 - DNA, 401 bp, Homo sapiens
aggttttgtttgtttgtttttcccaaaagaatttgatgcttgtgttttgaggagttaaaattctcaatgtaatagaagactctataataaacttacgtcttcttagggtgatacgaaaattattaaactcaatccccctttagttgcaaacaatcaatactcaataatttttttgaattgatgaacctctgattgtgtgcractatcttaattatgtctatattcttggtcttgtgatgaaaagtatccagaaaatgtctactattcatcactgtatgccttcttctttttagcacagagctttgtacatacgaagttctcaactaatgtctgttaatttaaattgaagaagctttagggagttactacaatttaggtctggaactcacatcccattttcc

SEQ ID NO: 482 - DNA, 401 bp, Homo sapiens
tatgagttgagtaaccatgatatgctagtatcttttcaaatatataattttttgattatataaagataaggttgatcttcatctcagacaattttccagcctagtagaaacaataaacacagttggattgtaacccaaacttcaactgtaggtcatctcacctaagttagtggatatttggtataatgtttagtaaaaagytacactttgtggcccttcatcatagcaaatattggctttattggcctttaatatcccaaataagaattatcaagaaaataggctccattttcattattaagtatttcagagaaataaaacaataatactgccttaccattgtaggtcattttatagtttccaagggttttcaactatatctttttttaaaaatttgaact

SEQ ID NO: 483 - DNA, 401 bp, Homo sapiens
aaacagacctgtggctaacaaaggattgtgggtggcagttgcttttagaaaccttggtgaaacttttcaaaagaatgtttcctatcaagcggtgcgttgtacatgtgggagaatccctgacagcacgttgctcttcctggagctccgtgagcatttattcccagtaatgtcctttggtgcttctttccttcatcccttaaygaacctaatccactctagccactcttcgtgatgtgaggtcaagagggtgaacayggcagatgtggcatttatgcgattacattctggtggaagaaaatgggccattaaaatgcaaaccaaaaatcaatgatctgattaattgcagattgtgataactgtaagaaagaaacagagtgccctgataaaaattaagtacgctg

SEQ ID NO: 484 - DNA, 401 bp, Homo sapiens
tggtgaaacttttcaaaagaatgtttcctatcaagcggtgcgttgtacatgtgggagaatccctgacagcacgttgctcttcctggagctccgtgagcatttattcccagtaatgtcctttggtgcttctttccttcatcccttaaygaacctaatccactctagccactcttcgtgatgtgaggtcaagagggtgaacayggcagatgtggcatttatgcgattacattctggtggaagaaaatgggccattaaaatgcaaaccaaaaatcaatgatctgattaattgcagattgtgataactgtaagaaagaaacagagtgccctgataaaaattaagtacgctgacttatttccatagggtttctgagaagatcttcactctggggaracaatattta

SEQ ID NO: 485 - DNA, 401 bp, Homo sapiens
agggtgaacayggcagatgtggcatttatgcgattacattctggtggaagaaaatgggccattaaaatgcaaaccaaaaatcaatgatctgattaattgcagattgtgataactgtaagaaagaaacagagtgccctgataaaaattaagtacgctgacttatttccatagggtttctgagaagatcttcactctggggaracaatatttaagctgcgagctaaaggatgacgatgacacataggaaagaatgttccaggctacaagaccaatcagaacagaagccatgaggcgggaagaagctacatgtctctaacttctagtcagtatgaccagagtgtagattgagacagacatgcagcatagaatggaatgagatgaaaatggagacagaggcggga

SEQ ID NO: 486 - DNA, 401 bp, Homo sapiens
cgctgatgtgtttatgattgataactgttttttgtcagctttttaattttagctgcaccatcttactttttggtacagatctatttactatctaggagttgtgggggacttggtgggtagccagaaaagatgacagctagcagagcttaggcacaggagcagatgtaagtgcaggtggctggcagtgtggggaccctggargcagctgctctcagggtaaaatccacgggaggactaggcagggtgagagagcatccccaggcaaagtagagtgacctgcctctgagagtttgggtgtagaatgcagcaggatgactcagaaaagtctgcagagctttagaaawgcttttttttttttttttttttttgatgtggtgtaaggttagaagactagaatgacg

SEQ ID NO: 487 - DNA, 401 bp, Homo sapiens
agcttaggcacaggagcagatgtaagtgcaggtggctggcagtgtggggaccctggargcagctgctctcagggtaaaatccacgggaggactaggcagggtgagagagcatccccaggcaaagtagagtgacctgcctctgagagtttgggtgtagaatgcagcaggatgactcagaaaagtctgcagagctttagaaawgcttttttttttttttttttttttgatgtggtgtaaggttagaagactagaatgacgtttgtctattattcaggagatgttctttgtaggagaaagaaagggaaaaagaaaaagattccaaatattttagtgggcattatgtagttccgtctcttgctccttcccttaattccccctccagaggggaaacagatatctgt

SEQ ID NO: 488 - DNA, 401 bp, Homo sapiens
tttagtgggcattatgtagttccgtctcttgctccttcccttaattccccctccagaggggaaacagatatctgtgaaactgaaaagcttgcatctttgtgagatctgctggagggaagctaccgtttaaacccagtctccattattttaaatggttttaagcctcacatgtagtgctatttatttttccttctaaaaaayatttctgggttatgcctccatatacaaaactcacctttgtgccattgtgctgttttgatgataggtaatttagctagatttagctaccatctattgagcacttaaaattaatctctgtaataaactctattcaggcatttcatcatttaatttaatacaaaccctgtagaaagtggatatcactcctcttttgctaattg

SEQ ID NO: 489 - DNA, 401 bp, Homo sapiens
ggttaaacagaagttacagtctgtgttaccaagggcctcgtagattactggagaagacaaagatgcaaataggcaattataataaaaaatgctacacagacagacaggaatatattcaagtcactcttaggcgcttctcctcccaaaacttaatcccccacttccattacgccatggtgccttccagaattagcgcagttygcatactgaaggaaactgaggggtggtcagaaacccagtttgtgcaggaaaaaaaattgtggagawcaaaattagcttcagtttttaatatcagccattaattctgaggaacaacttcatccacttaacttgattttccatcttccttgagtcccaaggcaaaactgaaatggaaaagaatctacaggatgctttcattt

SEQ ID NO: 490 - DNA, 401 bp, Homo sapiens
aaataggcaattataataaaaaatgctacacagacagacaggaatatattcaagtcactcttaggcgcttctcctcccaaaacttaatcccccacttccattacgccatggtgccttccagaattagcgcagttygcatactgaaggaaactgaggggtggtcagaaacccagtttgtgcaggaaaaaaaattgtggagawcaaaattagcttcagtttttaatatcagccattaattctgaggaacaacttcatccacttaacttgattttccatcttccttgagtcccaaggcaaaactgaaatggaaaagaatctacaggatgctttcatttagcaaagaggcaaacaaacccaaatcgagcagtacatcatagcaacccactaattggaagtctggg

SEQ ID NO: 491 - DNA, 401 bp, Homo sapiens
aatgaacttgttttattgcttatcatatggtccaattttgttaaacattcaatttgccctgggaagtaacatgcattttgcttattttaaaagcagtgcattataaatgcaaattaaggcatttatatataatgacatatatatgtgtgtgtgtgtgtatacatatatatgtatacatatatttgcttttgacttgtttcmtcagctactgggagaggtatgtcaaaatctcaaactttggttgtgaatgtactattctttataaaatttaaaactgtgttattaggtctataaacattaagaatgtttgtatatttttggtgtaatgacccttttatcagtatttttttcatatttatctctagaaatgctttgaagcctaatttgttattaatatatca

SEQ ID NO: 492 - DNA, 401 bp, Homo sapiens
ccacttgtatccctaaagctattgaaataaaaaaaatcacaaagtgctgttgcctactccacagccatgcaagtttgattctggatctgagacaagctatgatcacattgttgtagagaactgaggtccttggaaaataaaacacaggttcccaaccagaagttaattttattctgctgttaaaatggaactatgactttkcttatttataagaactgtccttcctttttaaggttaaaacatgttattttattataatgcaaataatattcattatttaaaaatagaaaaataagaggcagatgtagttctagctcttaataaacctggctaaacttttacaaatttcatctgatcatttatatacttttctacatgattggacttatttataatttgga

SEQ ID NO: 493 - DNA, 401 bp, Homo sapiens
tatcctttcactacctttgataacacactaaatttttctttactatatttcattcccttcttaatctcatttctaaaaactgtatttctgtcttacaatatatatatcattccttcagtactcctacctgttgatcttctcattgttatttactggcttgtcaggtcttggaagataggcttctcatacaacccaagcctstcttttgacctgactataaatattttattgtttacatcttcccctgcaaagaattcctctaggatctgcccctttcttgttctccaggcagtatgccttggacattctgtagctggctgggactgattccttgccaggtcagtaggacagatgtgtagactaagaaattaactagtgagttcaagtggaggttcctggcc

SEQ ID NO: 494 - DNA, 401 bp, Homo sapiens
aaaagaggaactaaaaaaaggctgagaaagcatgccatgaaggtccaggcttggacaacaagcataccatgatgtgaattttagccccatcacctactaactgtgtgaccttgggcaagcttttgaactcaccagggcctcaatttcctaacctataaaatttttgtgatcattattataattacaactaagaataagtaycttatcrttttgctgcaatacacgcgtgataattgtcctaaagtgcttagcatggtgtctagaacgyattatgtacttaataattattgtctgaaaaaataaacacatgaagaaaataccttattgtcaaagaatataatactgtgccccaacttgtgaaagattaaacctcttgtgtctccaggatttctaatagctta

SEQ ID NO: 495 - DNA, 401 bp, Homo sapiens
gaactaaaaaaaggctgagaaagcatgccatgaaggtccaggcttggacaacaagcataccatgatgtgaattttagccccatcacctactaactgtgtgaccttgggcaagcttttgaactcaccagggcctcaatttcctaacctataaaatttttgtgatcattattataattacaactaagaataagtaycttatcrttttgctgcaatacacgcgtgataattgtcctaaagtgcttagcatggtgtctagaacgyattatgtacttaataattattgtctgaaaaaataaacacatgaagaaaataccttattgtcaaagaatataatactgtgccccaacttgtgaaagattaaacctcttgtgtctccaggatttctaatagcttatcccaga

SEQ ID NO: 496 - DNA, 401 bp, Homo sapiens
catgatgtgaattttagccccatcacctactaactgtgtgaccttgggcaagcttttgaactcaccagggcctcaatttcctaacctataaaatttttgtgatcattattataattacaactaagaataagtaycttatcrttttgctgcaatacacgcgtgataattgtcctaaagtgcttagcatggtgtctagaacgyattatgtacttaataattattgtctgaaaaaataaacacatgaagaaaataccttattgtcaaagaatataatactgtgccccaacttgtgaaagattaaacctcttgtgtctccaggatttctaatagcttatcccagaaaggcagtgcagaggacatgtgggctctcttcctactgcagactcrggctrttctgatgg

SEQ ID NO: 497 - DNA, 401 bp, Homo sapiens
tggtgtctagaacgyattatgtacttaataattattgtctgaaaaaataaacacatgaagaaaataccttattgtcaaagaatataatactgtgccccaacttgtgaaagattaaacctcttgtgtctccaggatttctaatagcttatcccagaaaggcagtgcagaggacatgtgggctctcttcctactgcagactcrggctrttctgatggtggggtccaagggcagccttgcttctgccatttgctcagttgatcttgtgaacagctgcggttcttgctgtaactacttgctcgctctcagtgactctgtactgtaaatgtttcatgtgaagragcactgctctaaaacaaagctggaaracagggaggcaattgccagagctgtcattgtgctga

SEQ ID NO: 498 - DNA, 401 bp, Homo sapiens
tctagaacgyattatgtacttaataattattgtctgaaaaaataaacacatgaagaaaataccttattgtcaaagaatataatactgtgccccaacttgtgaaagattaaacctcttgtgtctccaggatttctaatagcttatcccagaaaggcagtgcagaggacatgtgggctctcttcctactgcagactcrggctrttctgatggtggggtccaagggcagccttgcttctgccatttgctcagttgatcttgtgaacagctgcggttcttgctgtaactacttgctcgctctcagtgactctgtactgtaaatgtttcatgtgaagragcactgctctaaaacaaagctggaaracagggaggcaattgccagagctgtcattgtgctgagtcag

SEQ ID NO: 499 - DNA, 401 bp, Homo sapiens
ctaatagcttatcccagaaaggcagtgcagaggacatgtgggctctcttcctactgcagactcrggctrttctgatggtggggtccaagggcagccttgcttctgccatttgctcagttgatcttgtgaacagctgcggttcttgctgtaactacttgctcgctctcagtgactctgtactgtaaatgtttcatgtgaagragcactgctctaaaacaaagctggaaracagggaggcaattgccagagctgtcattgtgctgagtcagggaaggcttcagcaatcatccaaagagatgtggcatttacacctgcagctggatgggttatgaacccaaataggtccttaaaaaggaaggctcatctcctttccccccaacagccccccacccactcaattt

SEQ ID NO: 500 - DNA, 401 bp, Homo sapiens
cagaggacatgtgggctctcttcctactgcagactcrggctrttctgatggtggggtccaagggcagccttgcttctgccatttgctcagttgatcttgtgaacagctgcggttcttgctgtaactacttgctcgctctcagtgactctgtactgtaaatgtttcatgtgaagragcactgctctaaaacaaagctggaaracagggaggcaattgccagagctgtcattgtgctgagtcagggaaggcttcagcaatcatccaaagagatgtggcatttacacctgcagctggatgggttatgaacccaaataggtccttaaaaaggaaggctcatctcctttccccccaacagccccccacccactcaatttttgcctactttaagggaaggtttttgg

SEQ ID NO: 501 - DNA, 401 bp, Homo sapiens
cattgtgctgagtcagggaaggcttcagcaatcatccaaagagatgtggcatttacacctgcagctggatgggttatgaacccaaataggtccttaaaaaggaaggctcatctcctttccccccaacagccccccacccactcaatttttgcctactttaagggaaggtttttggtaactaatttttcatctgctcattaragcttaccaattacagcatgtgttacaaattataggttccaggactttgggtgaaatrtgcttcgtaaataatggcatattttgctgtgagcagtccttgattttggactcttgcattacctttcatctcgcaaattttccgtataggaatacttggatgtacaaatttcaggcaagtatccgatgtatcttatagaatc

SEQ ID NO: 502 - DNA, 401 bp, Homo sapiens
ctgcagctggatgggttatgaacccaaataggtccttaaaaaggaaggctcatctcctttccccccaacagccccccacccactcaatttttgcctactttaagggaaggtttttggtaactaatttttcatctgctcattaragcttaccaattacagcatgtgttacaaattataggttccaggactttgggtgaaatrtgcttcgtaaataatggcatattttgctgtgagcagtccttgattttggactcttgcattacctttcatctcgcaaattttccgtataggaatacttggatgtacaaatttcaggcaagtatccgatgtatcttatagaatcagctacccgacaatattgtcaaaaagagaagcaacgctttcagatgatgtaagcatag

SEQ ID NO: 503 - DNA, 401 bp, Homo sapiens
tcacttttcacatgaaagtgtatgctcagataaaacaagactcatggagagcacatgggtgagatcatgctaggctctcattgctaggctgagatttgcatttttctgaaaatcagagtgctgaattttcttagctttgaagtagctaatgggacagtgtgtgtatatgtgtgtgtgcccacttgcatataattccgaatyacttgtttatgtgtagtatatgattctatgacaaagagctccctttaatgcaaatrtaaggcattcatgagcatctcatgtataagctcatattttgaactttgtttttcttttactcaaagaatttacaaaatcattttgtggtttgaaaagtaattcagatttcctataaaatgttatataaaattttaaatttagat

SEQ ID NO: 504 - DNA, 401 bp, Homo sapiens
gggtgagatcatgctaggctctcattgctaggctgagatttgcatttttctgaaaatcagagtgctgaattttcttagctttgaagtagctaatgggacagtgtgtgtatatgtgtgtgtgcccacttgcatataattccgaatyacttgtttatgtgtagtatatgattctatgacaaagagctccctttaatgcaaatrtaaggcattcatgagcatctcatgtataagctcatattttgaactttgtttttcttttactcaaagaatttacaaaatcattttgtggtttgaaaagtaattcagatttcctataaaatgttatataaaattttaaatttagattttagctagcaagtattggcttaactgtagaaagaacttcattttctaggaccatt

SEQ ID NO: 505 - DNA, 401 bp, Homo sapiens
aagctagaaagtctaggaactaagattcagaacaaaatcatctgattccactctctgtgctcttaaatacttcactagaataagtcttattttttataattgatacaactggtctaaatattaatgaagttttaagattcaatttacatatagcttctgtctctgtaagttaccagttattactacctaaaatacacttgkagtcaatagtaacattgaatattcctagattttattttwtaataccaaccagaataggaggcctcaaaayacctgtgatggaaaaaatgcagtgcctgagtgcatgcagctaagcctgatcactagaatacatttcatttatattttataagataccaaagacttcagaactacaaagagaactatagttgctgcaacca

SEQ ID NO: 506 - DNA, 401 bp, Homo sapiens
atctgattccactctctgtgctcttaaatacttcactagaataagtcttattttttataattgatacaactggtctaaatattaatgaagttttaagattcaatttacatatagcttctgtctctgtaagttaccagttattactacctaaaatacacttgkagtcaatagtaacattgaatattcctagattttattttwtaataccaaccagaataggaggcctcaaaayacctgtgatggaaaaaatgcagtgcctgagtgcatgcagctaagcctgatcactagaatacatttcatttatattttataagataccaaagacttcagaactacaaagagaactatagttgctgcaaccagaaacctattcacatatacgtacttttataaatcatgtg

SEQ ID NO: 507 - DNA, 401 bp, Homo sapiens
ttcactagaataagtcttattttttataattgatacaactggtctaaatattaatgaagttttaagattcaatttacatatagcttctgtctctgtaagttaccagttattactacctaaaatacacttgkagtcaatagtaacattgaatattcctagattttattttwtaataccaaccagaataggaggcctcaaaayacctgtgatggaaaaaatgcagtgcctgagtgcatgcagctaagcctgatcactagaatacatttcatttatattttataagataccaaagacttcagaactacaaagagaactatagttgctgcaaccagaaacctattcacatatacgtacttttataaatcatgtgcatatgtgtgtgggtacctycatgtgtgtgc

SEQ ID NO: 508 - DNA, 401 bp, Homo sapiens
aggcctcaaaayacctgtgatggaaaaaatgcagtgcctgagtgcatgcagctaagcctgatcactagaatacatttcatttatattttataagataccaaagacttcagaactacaaagagaactatagttgctgcaaccagaaacctattcacatatacgtacttttataaatcatgtgcatatgtgtgtgggtacctycatgtgtgtgcatatataaatacatctaaaagctgagaaccaccttagtctggggcattaaaattttagtaaacttttttgatgtatatgttgaataagttgcaaagttgaagtctgttccctgcctccatgtggcttacgtacacttgctaatgagaaaggagcttattacaaatattcatagatgtgatatatatgtg

SEQ ID NO: 509 - DNA, 401 bp, Homo sapiens
atattcatagatgtgatatatatgtgtacatgtgtgtatatatatgtgtgtgtatatatacatatatatgtgtgtgtatatatacatatatatatctttctccccctacacacacatacacacacccctttattcgctctcttttttttttttttttttttttttttagttggagtctcactcttgttacccaggctagartgcaatggtgcaatcttggctcactgcaacctctacctcccgggttcaagcgattcccctgcctcagcctcccaagtagctgggattactttctactatacaaattttactgtcatagacattggcttttgtacctccaaaatgtttgttattatccacggaaagggtacccacattttacttctatggataaattacac

SEQ ID NO: 510 - DNA, 401 bp, Homo sapiens
agcacttaaaatgctgcctggcacatgtagagactcagaatatgctttcagaattgaatgaaaatatcttgacaaggtagcacagtttttgcttttgtttttgttttaatagagtcagggtattgctctgtcaccccacccaggctggagtgcagtggtatgatacagctgactgcagcctcgaactcctgggctcaagcratcctcctgcctcggcctcctgagtagccagtaccacaggtgtgtgccaccacgcccagctaagtttttattttttgtattttttttgtttttttgagatagggtcttcctcagtcttcaggtacaatctcagctcactgcaacctcaacctcctgggctcaagtaatcctcctgcctcagcctcccaagtagctaggac

SEQ ID NO: 511 - DNA, 401 bp, Homo sapiens
tctcaaactcctgtgttcaagtggtcctcccgcctcagcctcccaaagtactaggattacaggtgtgagctaccacacccagcctaatattttattttttgtagacacagggtccccttatgttgcccaggctggtctcaaactcctgtgttcaagtggtcctcccgcctcagcctcccaaaaggttgggattacaggtgygacccactgtgtcagcctctcattgttttccatctgacaggtgagaaactgaacctcagagagcatggattactgacccagtatcacagctagtgcagtgcagaagcaggagtggaacctccatttggctccactggccagactccctatctgtgactctgtctccaagaagctcttcgaggccagacagcagcatcttc

SEQ ID NO: 512 - DNA, 401 bp, Homo sapiens
ctggggtcttttaggtcacaagtatccctggtcttttcatgactacacatttctggctgactttagagctctagatgtttttctcctatgttgatctaccccgtaaggctccatgagaggcttggactattgtttcacagtaggcttcctaagacattttgcttagctccttgaaggcttccacctgctcttgagcttagraggagaatatggcctagtcaaagagagaagagcataatagcagataggagtaagtgagcaggaaacacagagaaatggtgaagaggaggaaagaatggccaatagaagatggaaaggcagcagtcacggtcacaaaaaaagggtccagaaacaatacaggagatgcacaagagatttcattgcttttaagaagtgttatg

SEQ ID NO: 513 - DNA, 401 bp, Homo sapiens
ttacatatgtaagataaatttaagatttgtgtttaaatgacttttaaaagtaaaaaaagcattgggaagacttcttactcagaggttgtggtcagtcattttcaaataatttttcattgccaacatctcatacataaacttatataagcttctacaacccctcccagagtcagccttctctcttctttcagtaacatcctrtgttgccatctgactgaactgcaccatttgtcaccagttccaacacatcttgtcaacataccttttctattggaagaaaaaaagaaaatgggcttgaataaaaacatgtaaataaatgatgagcactttgctcttttggttgaattaaacagtgttgaaaggtgttagctagagaagacttaatagaaagtataacattt

SEQ ID NO: 514 - DNA, 401 bp, Homo sapiens
caccagttccaacacatcttgtcaacataccttttctattggaagaaaaaaagaaaatgggcttgaataaaaacatgtaaataaatgatgagcactttgctcttttggttgaattaaacagtgttgaaaggtgttagctagagaagacttaatagaaagtataacattttaaataatgtttaaggggaaaaagaaaaagayattttaggtttcagaataaataaaagataaaaataaataataaaagattttaagtattagggatgacttgcaaaatctcagaggtaaaggtaagaaacactagacagaaaataattttatttgaatttaaaaaatgggagagaatccacagaccctttgagggaactggatcatctttgcagactccctgagatgtcgaa

SEQ ID NO: 515 - DNA, 401 bp, Homo sapiens
agcaaaaacaatccctacaattcatctctcagaaagccccattcctaggagaagggggagaacaccacatcaagggggcacctcatgggacaaaagaatctgaacagcagttcttgaatcccagatcttccctctgacatagtctacctgaatgagatgggaccagaaaaacaattctggtagtatgacaaaataaggttrtttaacaccccccaaaaatcataccagctcaccagcaatggatccaaaccaagatgaaatctgaattgccagaaaaaagaaaaattggaaggttggttattaagctcatcaaggaggcaccagaaaaaggtgaagtccaacttaaagaagttgaaaacgtgatacaggatatgaaaggaaaaatcttcagtgaaataaag

SEQ ID NO: 516 - DNA, 401 bp, Homo sapiens
gagaaatgcaaaatgcactggaaagtctcagccatagaatcaaacaggcagaagaaagaacttctgagctcgaagacaaggcatttgaattaactcagtccatcaaagacaaagagaaaagaattttaaaaaaatgaacaaaggctccaagaagtttgggactatgttaaatgtcccaacctaagaataactagtgttccygaggaagaagagaaatctaaaagtttggaaagcatatttgagggaataattgaggaagatatccccggccttgctaaagatctagacattcaaatacaagaagctcaaagaacacctgggaaactcatcgcaaaaagatcattggcttggcacacagtcatcaggttatctaaagtcaagatgaaggaaagaatcttaag

SEQ ID NO: 517 - DNA, 401 bp, Homo sapiens
gcatatttgagggaataattgaggaagatatccccggccttgctaaagatctagacattcaaatacaagaagctcaaagaacacctgggaaactcatcgcaaaaagatcattggcttggcacacagtcatcaggttatctaaagtcaagatgaaggaaagaatcttaagagctctgaggcaaaagcgtcaggtaacctatraagaaatatctatcaggttaacagatttctaagcagaaaccctacaagttagaagagattggggtcctattcttagcctctttaaacaaaacaattattagccaagaattttgtattcagcaaaactaagcttcgtaaatgaaggaaagatacagtgtctaccaggcacacaaatgatgagagaattcaccattaccaag

SEQ ID NO: 518 - DNA, 401 bp, Homo sapiens
ctaacactggagcacccaaatttataaaataatcactactagacctaagaaatgagatagacagcaacacaatagtagtgggggacttcagtactcccctgacagcactaaactggtcatcaagacagaaagtcaacaaactctagcctgcaacaaatgaacttaaaagatatttatagaacattctacccaacaactgcmgagtatacattctactcatcagcacatggaacattgtccaagatagaccatatgataggccacaaaacaagtctgagcaaatttaagaacattgaaattacatcaagtactctctcagactacagtggaataaaattgcaaatcaactcctaaaggcatccccaaaccatacaaatacatgcaaattaaataacttgctc

SEQ ID NO: 519 - DNA, 401 bp, Homo sapiens
caataaatgtgatacaccacttaaacagaattacaaccagaaatcacatgattgtctcaatagacacagaaaaaccatttgacaaaatccaatctccctttgtgactaaaaacctcagcaaaatctgcatagaagggtcataccttaaggtaataaaaaccatctatggcaagcccacagccaactttatactgaagaggraaaagtggaaagcattcccactaagaactggaacaaggatgcccactttcaccacttctattcaacatcgtaccaggaatcttagccagagcaatcagacaagacaaagaaattaagagcatccaaaatggtaaagaagacatcaaattgttgctgtttgcagatgatatgatggtatacctagaaaccctaaagtttcc

SEQ ID NO: 520 - DNA, 401 bp, Homo sapiens
cagatgatatgatggtatacctagaaaccctaaagtttccaccaaaaagctcctagaactggtaaatgaattcagcaaagtttcaggatacaaaattaatgtaaaaaattagtagctctgctatacactaacagcaaccaagctgagaatcaaatcaagaactcaacccctttcacaatatcagcaaaaaaataaaatacrtaggaatatacctaaacaaggatgtgaaagacctctacaaggaaaactacaaaacactgctgaaagaaatcatagacaacacaaacaaatggaaacacatcccatgctcatggatgggtgaattaatattgtgaaaatgaccatactgccaaaagcaatctacatattcaatgcaattcccttcaaaataccatcatcac

SEQ ID NO: 521 - DNA, 401 bp, Homo sapiens
gtgaattaatattgtgaaaatgaccatactgccaaaagcaatctacatattcaatgcaattcccttcaaaataccatcatcactcttcacataactagacaaaacaatcctaaaattcatatggaacaaaaaaagagcctgcatagacaaagcaagactaagccaaagaacaaatctgaaggcatcacattatctaacatsaaactatattataaggcaatagtcaccaaaacagcatggtactggtataaaaataggtgcatagaccaatggaacagaatagagaacccagaaataaacccaaatacttacagcccactgatattcaccaaagcaaacaaaaacaaagtggggaaaggacaccctattcaacaaatggtgctgagatcattggcaagcca

SEQ ID NO: 522 - DNA, 401 bp, Homo sapiens
aatgaaactggatcttcatctcttatcctatgcaaaaatcaactcaagatggatcatatacttaaatctaagatgtgaaaccataaagattttagaagataacatcagaaaaacccttctagacattgacttaggcaaagacttaaatgaccaagaacccaaaagtaaatgcaacaaaaacaaagagaaatagatgggaaytaatgaaactaaaaagtttctgcacagcaaaaaaaataatcagcagagttaacagacaatccacagagtaggagaaaatcttcacaatctatacatctgacaaaggactaatatccagaatctacaaagaattgaagcaaattagcaagataaagacaaacaatctcatcaaaaagtgggctaaagacatgaatagacaa

SEQ ID NO: 523 - DNA, 401 bp, Homo sapiens
tttctcacagtttgatttcaatcctctcacattttgtgaggtggctgtttataccaatctgtggcctaagatattcttatgactattacttgtttatcaaaatggtacacattcttcagttgcagctccacaggctttctggaactactgtaattaacattgatttctttatctctttccttatttgtcatgtatgattakcactacatagaatgacatttactttttctcctttttcttttatatgtgctaattctgtctctttagcctagtcagaagctctgagttcgcagaataaccatgaacacagaattaaaggtctagatagatcttgtctaaccctttcattttcaaagaaggaaagtttgtaaaatggaaactacagtgatattgagtgtata

SEQ ID NO: 524 - DNA, 401 bp, Homo sapiens
agagcaagtaataatgttatactgagtgattaatgaactgatgtaaggactcagtaatccgcatgcaattagtggatcaacaaagcaatttacgcagtaggtatgtattttgaatagtattctttctgtagggaaccagctgtatgtagtgtttaattgaatgcttttgcatcacagagtgatttggagtcaaatcatcarccgcatttcccaatgtgtcaagtagacagttaacttatcaaaacttccgtagtactcagttctcttccaatgtgctccttatcttgaattcttttgaaatagtgtgccttataattttccaggaatgatttacatgtattcctgttcagagacagagggatggattacataacattccctgaggccctttttgccttcga

SEQ ID NO: 525 - DNA, 401 bp, Homo sapiens
cattcattttcccctggtgaataagctggccctttcccaacctgactctcatcttgttatttgatcccaagatctgtaactcctctcagaccatctgcattatttctctgtccttgctgatgttttgcaacattctccagctgactatcatctgcagatttcattagcacaccatttactatgttctgaagatcattaatraagatgaataaacagaagagaagaccttctgcagacatctgtggaatttctctgggctgcccccacaactcgatcgccattgttttattttacctttttggttttttgcctagtgtttcattcacttccctccataagcaccctgttgtcatatctgagtaactgcactcataatgtgtgattttcttgcacagctttat

SEQ ID NO: 526 - DNA, 401 bp, Homo sapiens
atgaagatttatatctaacttatattgaaaaatcaaaggattagattttttaaactgaataagaaccatagctgtacttagagaatatctgtgatgcacttggcactgtgataagatgtgatgtatatcactatgattacaccaaccctgaatggcacttattttcaggtgtgacactagcctatggcggctgtcatgagrattagaaaatggtgtcccctccaggaggatactgcctgtgcctgagaatagagcacaggctgcatctaaggacccactgaccttctaggccagatatctttgtgtgtggcagagcctgcctaaatgtacatggaagccacgatttctttgtcatttaaatgaagaggataagatacctataaaagatagatttgagattg

SEQ ID NO: 527 - DNA, 401 bp, Homo sapiens
ctacttgggatgctgaggcaggagaatcacttgagcccaagaggcaaagttgcagtgagccaagatcatgccactgcgctccagcttgggctacagagtgagactccatctcaaaaaaaaaaaaaaaaaaaaaaaaaaaaaactactacttatcaaggaatgttttgaatgctttaattctttgacttaaattactatatwtatttataaaggtgtagaagatttracaactggaatgtgtgtgtgcgcatgcacatatacacacatatgcacatatgtatatatgtgtatgtataacatatatatctataaataaaagttatttaccaaagcatcatatattttcattttcttttctttccttttgttagcattttcatttttcttgagtactgttttta

SEQ ID NO: 528 - DNA, 401 bp, Homo sapiens
atcacttgagcccaagaggcaaagttgcagtgagccaagatcatgccactgcgctccagcttgggctacagagtgagactccatctcaaaaaaaaaaaaaaaaaaaaaaaaaaaaaactactacttatcaaggaatgttttgaatgctttaattctttgacttaaattactatatwtatttataaaggtgtagaagatttracaactggaatgtgtgtgtgcgcatgcacatatacacacatatgcacatatgtatatatgtgtatgtataacatatatatctataaataaaagttatttaccaaagcatcatatattttcattttcttttctttccttttgttagcattttcatttttcttgagtactgtttttattgaaatgcaccttgcactttagct

SEQ ID NO: 529 - DNA, 401 bp, Homo sapiens
agctggaacagttcaataagagtctccctctagcctctccttacttctgaataagcaaagttaagctacagtcaactagtcggcttctctaatattctgtattgttctgaggtttaaggctttgtttttttcttggctgtctaggctctctgattaactgagattaatctctatcatcctgtgtaagctaaaccctaaatyacataatatgttttctatctgtatgccatatgccttccatgtcagggatgactccagagacaacaaaagcaagctgtgtttttactgattttgcaaacttgcattcatcagccttgggcattttggcctccccagtgtcagtatggtgttttaatagctgagaaaaacaacagaaatataaagagaggacactgtgaaaa

SEQ ID NO: 530 - DNA, 401 bp, Homo sapiens
aacaacagaaatataaagagaggacactgtgaaaatcactttccaaactgacttgtattgaaactgcctcacatctaagtaatggaaaataacagtgattaggataatgcggtgcattacattcggtgacagttaatcctcttattaacttcatggtcatatttcgctcatttgttaggttggaaggactgtgtgagaatrttgtagttcctgtttttctgttcattgggaaagttgggaaaatagttctaaaaataaaagagttccaggttgaaaagcctttgaggttgactgttctctctggagatgcatgtttaccttgtgccctttatccatgctttgagtttgggtacccactctttgaggcctcattctcttccctttagaggattttctttcca

SEQ ID NO: 531 - DNA, 401 bp, Homo sapiens
taaaaataaaagagttccaggttgaaaagcctttgaggttgactgttctctctggagatgcatgtttaccttgtgccctttatccatgctttgagtttgggtacccactctttgaggcctcattctcttccctttagaggattttctttccacctgagcaatcaccagtgagggaaaagtcagtggggtggttcagctgcrtgatatgttgcattgacaaatggaggcagagccctgctccagccccgtgagttggaacaacctacaaagcatttctggcagtgagccaaagaggtgatccctcctctagggaaaaaaaaagtcaatggctgagattgcagttctccatccccttgctgggctgattcatacagcagcattgacactgaggtctcagaaga

SEQ ID NO: 532 - DNA, 401 bp, Homo sapiens
ccctcctctagggaaaaaaaaagtcaatggctgagattgcagttctccatccccttgctgggctgattcatacagcagcattgacactgaggtctcagaagaactgttctcttcccagtccatctaaaaatatctaaattcagatttataatgtcaggagctgataaatttgctgaggaaatgcaagcagtgtcactgccrtgctaggaaatctattctgatgaattgatgagggaaagaaattccaaacatagcagagtctcagagtgccacttcccctgggatggtgagcaaaatgagcatgttttccttgccatcgaagttcccttcttcaaacatagtagaaagtagaatatactagattgaaaaggaatatggaaaatacctttttgatcaaaagc

SEQ ID NO: 533 - DNA, 401 bp, Homo sapiens
cgtcaagcaaggggttcccttttaaaatgctctttcactaagacaaaaattccactcacatagccctggtgacttttgattgaatcaggatcttttaaatttggaactcagcaagaaaccgactgtcttactttcctacaggttttgtttgaactttcagaatctaagttgatattgcggtctgctgctaaccagctcttycctctctttagttggtcagtggattctcaggagtattataggatgtttcctccataccacctggcttgaaatgatttggcataggcttcaactctaatttattcagcatccctttagcgcctactagaaaccaagtatcatgactggaacttttctgaaatgatgaaggtgccatggggacagatgggcgtgtaaagaac

SEQ ID NO: 534 - DNA, 401 bp, Homo sapiens
taagaaatagatctactgaaactaataaaagaattccattgttgtctcctccatttaaaaaaattctacctgaaatacttgttagaatttttataaaagtagtatctcatttatgtacaaaatagtttgtgtaaactataagtagacaaagatgtagggttgtatcacttctttgataagatactgatcttgtatttttamccaatgctaggcttaataaaagggtcctgtaaaatttactatgaaatctgtatgcctccctccaacttcttttccaactgagattggagtatggcaaaggaaatgaagcatgaagggaaaactaggagctatgataatctaagattcataaacaattataacattatttgctcacttttgattgtgcaaatgactaaatc

SEQ ID NO: 535 - DNA, 401 bp, Homo sapiens
gcccacatggccacaggatcagagcaggtcatggtgaagcagaggagaaacagctgcaaagcagagaagaaagtccaatagggtaggatgtgatgaataatgttgtgaaacagacagctagtgccagtaaggctcctatatcatagaagtctaggaagatacaagcaagtgctgtcatagacagataaatgaagtggacaytgttttgagacaaaagcaagctggcaatatcagagaagcttactataaagagcaaaatgctgggtgcactggctcatgcctgtaattccagcagtttgggaggccaaggcaggaagattacttgagctcaggagttctagaccagcctggtgagacctttatctctacaaaaataaaattaaaaactacctgggcatgat

SEQ ID NO: 536 - DNA, 401 bp, Homo sapiens
acacatttgaataaagcagcatgacagtgggacaaaaagtacacaagacaaaagctccatcgttagggccaaagcataggaacaaactcaggccagtgatggagcaacttcagctgagattttagccaagagcttgttaacatctttccagttcccagatagaattagtcctaaggaattacgaacattgtattccatggyatatatatatatactacattttctttatcctctaatcaactggtgatggacactgaggttggtttcatatacaagagcagatgtcttttatttttttttttttgagacagagtctcactctgtcacccaggctgaagtgcagtggtgtgatctcagctcacggcaatgtctgcctcctaggttcaagcgattctcctgcc

SEQ ID NO: 537 - DNA, 401 bp, Homo sapiens
atttttagttccttgagatatcttcatactgttttctatacgggttgaaccaatccatattcccaacagtgtataaatgttctcttttctccacatcaacatctgttgttttttgactttttaataatagctattctgactggtataagaggtatctcatgtggctttaaattgcatttccatgaaaaagaatgaaatcaygtcctttgcagcaacatggatggagctgggaaccattatcctatgtgaaataattaagaagcagaaaatcaaatatctcatgtattcatttataagtgggagctaaacaatgagcacatatgcacataaagatggaaataatagatactggagacaacaaaaatggggagrgagagaaagctgaggattgaaagatgatc

SEQ ID NO: 538 - DNA, 401 bp, Homo sapiens
ttgcatttccatgaaaaagaatgaaatcaygtcctttgcagcaacatggatggagctgggaaccattatcctatgtgaaataattaagaagcagaaaatcaaatatctcatgtattcatttataagtgggagctaaacaatgagcacatatgcacataaagatggaaataatagatactggagacaacaaaaatggggagrgagagaaagctgaggattgaaagatgatctattggataaaatcttaattatttgagtgtatacggagagcccaatcttcaccattacacaatacacccatgtaacaaacatgcacatgtactccctgaaactaaaaaaaaaagaaacaagcattgtgaactgctggatccccaagaaaggcagatgaccataactaggaa

SEQ ID NO: 539 - DNA, 401 bp, Homo sapiens
aagcaagacaatttgttaaggcttagcatgcaatcaggcatccaaaattccatgaaaaccagaaggcagggtgaggaaggaacaggaaccaggcagcagttctgtgcagtggcaccaagtgacagcaagaaggcagcagtactaccaaggcaagattacacccagccaaaaaaccaccagtctgcagggcagccaattgayactccaggcagagccattcagagctgaagagaaagcactaaaaaaaagtgcagccacttctgtgattaaagacaatgcccatggtactaaagtaccgtcttggagacactggtcatagttgttaaagcttccagccctcccagagaacatctctatgaaaaaaatactggtacagcagccccaggcccaccttctggagg

SEQ ID NO: 540 - DNA, 401 bp, Homo sapiens
ccagaagccccaaaagagcagagaccctgactgatttgttccatggatacctccagcatctagaacaggacatgacatatagtaccccttcaaccagtagttgcctgacttttctgccctcatttaatggatcctgtctctgaacctgcaggcatcatcatatactatcgtaagtgatttccttagcttcctaaacccagraagaatccacattctatttctcatggtttttttctatctgtatagcagcatcaaagtgggccctggtttttagtttgagggatatgccacttctgcaaccagctggcataaatgtggcaattgacacgataagagaagctgttctcccagccagggaagaggcattaccaattacaggcctatactataactgtgccttt

SEQ ID NO: 541 - DNA, 401 bp, Homo sapiens
tcgcacgcatacacacatgctcagacaatgagggtggctatctggcagcttccacctttcccactagagttttcaaatatttgccacactatgccagtgccaaaatttatataataatctatccttcagaggcttctccccttgagctgctcacaatttacccctccttctaactcacaaggagttacaaggccctggaawtgtgcctccctcgacagccacaagtgaaatagtcaccaggttcatggtcttactcgaatccctgtcatgcagggatttcttcatttgcttggaatgactcatcaaacagcctagctttacagttccttgacctcggctcttcccaggacttttatctccatatgtcgacaggaatctactttcttggcacttgttactaa

SEQ ID NO: 542 - DNA, 401 bp, Homo sapiens
ttaaattttctgtagagatagtatttacctatgttgcccaagctgatctcagactcctggcctcaagtgatcctcctcccacctggtatgaagcactgtgcctggccttgaatttcttaatgatgtttttgtgaatctatttgtcaagagtacaactgccagatttttgtgcatttgtgcccctctgctccgaagtacccygactgtcagtctattcattcagtcatcaaataactttggggcatctattctatgccaggcactactatggtaggccttcaataaagggaggctatgtttacatgggccttccacttcacaggcaagaaccgcactactgaatctcccgtgtctttgtccctccagataatttagtgtgcaccttatgaccttcactgaca

SEQ ID NO: 543 - DNA, 401 bp, Homo sapiens
tactaaatcagaaataccaaattcataagtcatttggaagggtaacaaatgtttgatggtttgtcaactagtcttgacaaacggattctacaatgtacagaaattatggagacagttttcactgatagatgttcagtgcctcaaaggaaactcattaagatgagggaatgccctctcaaatgtaacaggattgttgaatayatcaacacaaaagatcactagcaaatggattcctaatgaattcctggttgaatttgcctctgataattatgtattcatattcagtttgagcattcagatgtgttaaatatggccaataatagcactgatttatttcctcctttaatttagaatatctttaagtagttagaaggaaacccttgttaactaatccattgaca

SEQ ID NO: 544 - DNA, 401 bp, Homo sapiens
acttttctttccaaagggaaaaatttttacttatgaaaaatgtggtaaaatatagaataggaaattctgaaagatacaagttcttcttgaacaatgagcaatgtaaaaatgataaaattattgcatgatacaatcttttttaaaaaagagaaaacactgagcatcttttccttaagccccctttcataaaatctcatattwtgcccacttctccatcttaatgattgtggatttctttctcaagacctacttaatacatctcagttggaatttcgaaatgctggcaagtctttaaaaatagacagatgatgaccctaagacatttggaacttatcctaaaggctgaggcacagtagagaaaatatattgaataatatacaattttggtcaggaaatgagga

SEQ ID NO: 545 - DNA, 401 bp, Homo sapiens
aaaagaagtatttcttaccttcttctctaagactgcacattccttgggggtttacccatttgagactgcaagaagatgaaataactcacttttctctattaaaaggtgatctcaattgctatagagagaagaaataaacaattattaatattcctgtgtcagagagtgtttataaaagcaaactgtgaggttcgtaatctktttttagacaagaaaaagatttaaagaatgacttaaagtgatgattataagaaaataaggagaaaaaggagagagaggagaggttaataggtaggggaaattgattctagaccaagcacttaagaattctagttctatgtttgatttcctttttatacatcttgcactttgctctaaagcaaaggagttacaaaattttt

SEQ ID NO: 546 - DNA, 401 bp, Homo sapiens
agttctgcttcccaagttcatgtaccattccagcaaattccggaattcttttcatactattcattctacaataacttgacccctctttttgttgacgatgactttctgttgcttacaataaaaagaccccagtagctgggcacagtggctcatgcctgtaatcccagcactttaggaggctgaggtgggcaggtcgcctgrtgtcgggagtttcagaccagcctatccaacatggtaaaaccctgtctctactaaaaatacaaaaattagctggacatggtggtgtgcgcctgtagtcccagactcaggaggctgaggcaggagaatcagttgaacccaggaggcagaggttgcagtgaagccgagattactgttgattactgttacactccaacctgggt

SEQ ID NO: 547 - DNA, 401 bp, Homo sapiens
ctaaaaatacaaaaattagctggacatggtggtgtgcgcctgtagtcccagactcaggaggctgaggcaggagaatcagttgaacccaggaggcagaggttgcagtgaagccgagattactgttgattactgttacactccaacctgggtgagagagagactctgtctcaaaaaaaaaaaaaaaaaaaaaaaaaaaaagamcaaaacaaaaaaaagcctaaattatacaacaggatccatgggagaacatcttgatagctttttagcaggaacatcacattccaaatgcttgctagctattttctgagtatcagttatatttaccatgatcctgaggagcagaccctttattgtgtcccagttcagtttgcatcgtcttcatacagcataaggcaacagtg

SEQ ID NO: 548 - DNA, 401 bp, Homo sapiens
agagtggtttgtggttggaatttctcttgcttgttgatatatgtactttccatgttggactttgtgcttatgtgaattctccacgtctcaaaggcattatgtctagcaagcaatttctcataaattcttatccatacagttattctatgagagcattgcaaatatagtcagattaggctttgatttgtttttcattctaaygctatctaacaaggggatgttctgatttgtgtagccctgtgcctccaagaagttaacggtaccagatacacagctcatttattttcattgtgcccatgtggttttctgaagtcacactttgtgttgttttacatatgggaaaatggaaacctggctaacttgtctttagtaagtgattggtggagaaattagtagaaact

SEQ ID NO: 549 - DNA, 401 bp, Homo sapiens
agctaaaattgaatgagttagttacaaagtctgtggggttgactcgagtagagggtggttgatcagtgtaggtttaatgaaattaaaatgagtaagattctataaatgcaagactggccagagaaagtggggagctctggggccagaacagcagaggaccaaaggcatcctacacagccaattaaggaattttcctactgmagcatggggtccagggagcttcatttgtaatcccttgttctgctttgtttcattcttggactctaatatggtttgactgtgtcctcacttgaatctcaccttgagttataacaatccccacgtgtcaaggttggtgccaggtggagatgattgaatcatgggggcagtttcccccatactgttctcctggtaagtaaata

SEQ ID NO: 550 - DNA, 401 bp, Homo sapiens
aatattactaccattattgcaattgcgtagtagtacatgccaaattcaccctgtcttttcattttacttacctttctcttgtcccacatgcttttattcttggcatgcttacctacaaaattatcctttttttctatttccgtattccctatgccctgtagtcttctttcaaagcccctttgaaatgctatcatgaaagayggatttcttttctcagtgctgtgagcacctccatctcctcttctcttctttcacggtgcccatttcttcttcatctcatcaagtatgcagtcctttcttcgtctgcactgttatgtacctccttccacctttgtttcttccaaacttgtatttcttttgtctttccatttaacaggcctcatttcttttatcttaggaat

SEQ ID NO: 551 - DNA, 401 bp, Homo sapiens
cactccaattaaacaaaagtctatgtccagttgaagtctggaagcctgataagcacactgaagtaaaagtcgcaatacacatgaatgactgaaagtaggttttgttaccagtggaaaagacatttgtgagaacaaaatgacacataaagaggaagcaagtgattactgacttactggaaatcccaggccgggcacggaggytcattcctgtaatcccaacactttgggaggctgagatgaggggcttacctgagctcaggagtctaagaccagcctgagtaacaagtgagaccctcttctctaccaaaaaataatttaaaaaaaattagccaggtatggtagcccatgcccatgcctgtggcctcagctactcaggaggctgaagcaagaaaattgcttga

SEQ ID NO: 552 - DNA, 401 bp, Homo sapiens
accccatgccccatctctactaagggggggtgggattcactgtcaaaagagttcttctctttaaattctatacaataggtacagtaattatatctaattgcatttgaaacacaatagttattaaggcaaacgtttctagactagtttcattattaaataaaaattgaaactgagagtttttcccatattggtaaatattgwtttaattttttaattgaatgggaataatatgggcatttttttatcatttgcccaaaatattttaagaaaatactatatagtgtaaccttttttttttttttttactatgaaggcattaattttgttttatttttagtacttgcttccagttcacttttcaaagtgtcctttaggcttgttagtttcaaaggaaataatat

SEQ ID NO: 553 - DNA, 401 bp, Homo sapiens
tagaatttaaataacttgctcaggaaggcatagccaataaatggaataagtaagtctcaaatctggacagtctatcttgagaaatgcatgcttaatcaccatcctctattgcctcttaaataatcaaagcccgtaaagattttataaatgacttttctcatgaataatagggcctggggtgagtttctcaatatcacttayggcaataagaatttcagcaatcataatcttggtgcattttccaaaaaggatggctccccattgggtaacacaaggtgaaatgtgtattctgttagaaatttttgattccagcctagggaggtatcaagaataatgctgttgccataaagatataagtcttgagacaaacactggagaggttcagtcattcaatcaactat

SEQ ID NO: 554 - DNA, 401 bp, Homo sapiens
ttttgcttcccctttcagaggaaactacatttgatcattaaaccaatacatcatttatattcattttttcaaaatatattaggttggtgcaacagtgattgaagttttgtcattgaaagtaatggcaaaaaccacacttttgcacctacctaatataaaacttcatttttgttttgtctttcatattgatgaaccatcatytgtttatttttttggatattggattgccttcattgttttcactattataaatacccctattacacatacaaaatcaaaataccatttttgccttggctttttaagaaaataaacgttgattttaaaaacaatttcagatatacagaaaaattgtgaagatactacagtgaattctcatttccctctaccatgttccccct

SEQ ID NO: 555 - DNA, 401 bp, Homo sapiens
ataattattaaattctattgtatgcttgtagctgaacaaaatttttaacccatattgctgtaggaaagacactttatcaactagagagtttgagtttatgtgcagttcctcttccttttagacttacagactccactcatttccaaaattactgttaaccacttttaccttcagtgaggttgtagtgtacatttgtgatayagttatattcttttggaacagcctgcattccatcctgtgataaatatgtattgcaaactctaaagaaacctttttaaaatgactaaaaagaagattaaagatgcagtgatgcgggaaatcagtaaggatataaaatcagtaatttgacctgaacagcactatcaatcaatttgttctaattgacatgtatagactattcc

SEQ ID NO: 556 - DNA, 401 bp, Homo sapiens
ttctcaccacgatgtcagtacggaagtttgaaagaaaaatgtatgcgtctcccgtagagcccatgaacttgttttcttttgcatattatagaatctgcaggtatttttcaaatgaggaccacaaacattcaagtattaggttttcttacaatgacagccaatttagcaagcccaaggttttagagcatccttcaagaggcwggttccatttgcacgttcatgttcaattcgcaaagcaacagcagcagcctttacgtatcccacgattaacacttcaacctccagcccattttgtaaggttaggcattcatcaaaatgtcagaatgattacagtacagatctaaaatcccttttgtcagacactggactttaatccgctcttttctgtagtcacgtcctgt

SEQ ID NO: 557 - DNA, 401 bp, Homo sapiens
taaatttctgttgtttaggccacccagtctgtagtgcttgtaatgtcagccccagcaaacaaatacagcctctcaactatgtctcatcggtaaattaattatttctccccaactcataccataaaatattttagacagcttgcacaagcccccaaacaaaaaaactgtgatgaaatggctaaatagtgtagtagccatggygtatacgaatataaacagaaacatcgtaacaggaaaaaataagaaagtccattagatgcagttgagcttccagcttgtctcttagtttcctggaaaccaaagtgaaaggaggtacctgtttggtcagaaaagttttagtattacaaaggaaatagcattgtatttctttaggggaagcaaaaactttttcttagccctaa

SEQ ID NO: 558 - DNA, 401 bp, Homo sapiens
tcttataaacataagaaagctacataagcatcacaaaaaattacaaacagctatgcctcattttcataagtgatgtcctgactctatctgatctagttttcatgtaagtcctttgccactttacatctatcctcaaaagcctaacggaatctggctggataccccaggtgcttcctcaacgtagaagttttctcttgtttktttttttttttattctgagttattttgaatatatcagtcaattttaatctaaacttgcattatgttttcaaatacaatataagaatttaattaaaaacaatgcttcactgacagcagctctacaattctgtatttgacattgtagtacaacatgcaaaggcatgtattgaggtcagtctgaaatgaaacacttagcctct

SEQ ID NO: 559 - DNA, 401 bp, Homo sapiens
ctcctgatgagctctgagccttctcagtgctatgagtatttacatcaggcagaggtgggttgggatccaaagcttacccaccctaatatgagtaagatgattctattacattcatcctagagagaatatccttcatagaaatagaggaagaaaaagcttgcatttggttaggaatatagattatgaagagcctccttatcytgaaagctgagataatatctgtatcatatgtggtaacaaaaaataaggttatttgtataaagaagttagcatataggaaggtatatagtaaagtgcttcataatggcaggaaggaaagaaatattgaaggaaaaatttaaaagacattgcgtcagttggtatctgtttttggcaagtaaacaaacaaaatatattttctc

SEQ ID NO: 560 - DNA, 401 bp, Homo sapiens
atatgccacataaccataattcatcctggcaattaggtaaacagtatacagaatatgactctcgccattaaataaacttaagcaaggtatctttatcctgaaggaattcttagagatttcatcatgagtaagcacttttcagtatagaattgccaaaatacaaaagaacaccagagaaccactctaacttctaaaaaaaawaagaaacccaaaaccttgtgattgaaaaaaaaaaaaaaagtaagaaaaagaggcccttagtcattctgttcccttttgggcctctatctttcatttcctctggggaaataaagttataaactgtgctggcagtaatctagggtgatgccaagtcagttacccacccccaactccatgtctccaaaagattctttaccacc

SEQ ID NO: 561 - DNA, 401 bp, Homo sapiens
aagaaaaagaggcccttagtcattctgttcccttttgggcctctatctttcatttcctctggggaaataaagttataaactgtgctggcagtaatctagggtgatgccaagtcagttacccacccccaactccatgtctccaaaagattctttaccaccctttgactctaattaaagaaaacaaatgtttccagttttctrtcatgtacctttccactctgaattatagaatagctttcttgaaattcttttaattgttttttacaaaggattagcattaaattcatagataaaaataaattagtaatagtgatcaaaatgacctaactccactttgtttttacttttcttctgggtaggagggcaaataacataactgcttatatggtgatttattttaa

SEQ ID NO: 562 - DNA, 401 bp, Homo sapiens
gataaaaataaattagtaatagtgatcaaaatgacctaactccactttgtttttacttttcttctgggtaggagggcaaataacataactgcttatatggtgatttattttaaattgaatctgaatttctatttcttaaggcctcattggcttcatggcaaataagagagttttaaagaatttattgtgttaatttctgaraaaccaggagtttactgttgacaataatggcacaaattacaactcctacacagctctaccccctccacttttgagtttcaagacttttgccaaagttttctggtctttgttcacttctattattaacatctcttgtgtgaaggggaattttgaatgaatgggatgaaatcatctaaaccagcttcggtcctaaatatagt

SEQ ID NO: 563 - DNA, 401 bp, Homo sapiens
tttgccaaagttttctggtctttgttcacttctattattaacatctcttgtgtgaaggggaattttgaatgaatgggatgaaatcatctaaaccagcttcggtcctaaatatagtgtctggcatcaggtctgggaaaaaaaaaattggtcaaagagatagcctgaggttatttttaggaagttggatgtttagggaaattratactatgaaagttctggcctctatctctgaagatattccattgagagatacatgcatgcattcaacatctcgtttttttccattcctgcccttygggtgttccgcgtcattcactatcttgtcattacagcattaagcagaagcttgaggcagaagatagctaatgcaacgtttccatttggtcctgtaatttttctgc

SEQ ID NO: 564 - DNA, 401 bp, Homo sapiens
gcttcggtcctaaatatagtgtctggcatcaggtctgggaaaaaaaaaattggtcaaagagatagcctgaggttatttttaggaagttggatgtttagggaaattratactatgaaagttctggcctctatctctgaagatattccattgagagatacatgcatgcattcaacatctcgtttttttccattcctgcccttygggtgttccgcgtcattcactatcttgtcattacagcattaagcagaagcttgaggcagaagatagctaatgcaacgtttccatttggtcctgtaatttttctgcacagagctttataggatttcatttcgggttaataaggggaagttggaaccgaggagaaagcttatgctctgccaacatatactgaggattactaa

SEQ ID NO: 565 - DNA, 401 bp, Homo sapiens
ataaatgtcacatgttcgttgaatgatccagatgtttcaaatatacagttgttttatatttggtaaacaatgcagttaggtcatgtaaattttaatttttcatttggagtttatccctatgcaggcaatcatagattagaaagttatttttttcatgtcctacctctttgaattgtcaggttcttttaaatgctgttatgyagcaataaataatattttatccataatcaaggtggatgacttactggatatcagatattattattaacaaaaagtttactacattgtacaartatcactagacaaagacaacctctagaaagttaattaaggtaactaaggttctcaactgcaaccacaaaactttcacagttaataataatttcacagttattaacata

SEQ ID NO: 566 - DNA, 401 bp, Homo sapiens
taatttttcatttggagtttatccctatgcaggcaatcatagattagaaagttatttttttcatgtcctacctctttgaattgtcaggttcttttaaatgctgttatgyagcaataaataatattttatccataatcaaggtggatgacttactggatatcagatattattattaacaaaaagtttactacattgtacaartatcactagacaaagacaacctctagaaagttaattaaggtaactaaggttctcaactgcaaccacaaaactttcacagttaataataatttcacagttattaacataactttttsaagaggtactatactaaaccaaggatgctaaatataacttattaatttctgtgatggcttctggggatatcaatattggtatac

SEQ ID NO: 567 - DNA, 401 bp, Homo sapiens
aataatattttatccataatcaaggtggatgacttactggatatcagatattattattaacaaaaagtttactacattgtacaartatcactagacaaagacaacctctagaaagttaattaaggtaactaaggttctcaactgcaaccacaaaactttcacagttaataataatttcacagttattaacataactttttsaagaggtactatactaaaccaaggatgctaaatataacttattaatttctgtgatggcttctggggatatcaatattggtatactttcctcactgcaatgaagacacttctgcatctacttttgagatttttttggtcatctttctagcagccagctgtcacctcttgctgctgtaacagttcctagtaatagttccctt

SEQ ID NO: 568 - DNA, 401 bp, Homo sapiens
gtaaatatatgtttgaaaaagaattaatgagctcttaattgcagatcaaaggatatggtttgatagtgaagtggcccaatgaaagttgtttgaattttccttttgtctttctgtaaatggaactgtgttcttgaaagcctctacgtctttatcttgttcctcaagattcttagggcagtgcgtgtgggtcaggggtaggtrtgtctgggaattaagagtatctagttgatttagtagctatatttctcttctttagcctgtttattgggaaatgaaagacaatttaggctatttcattttcagtcagtgtctgttatgaattcattggaaayagcaatgtgaaaagaggaatgaatattgtagatttctttcattgtcatatttgtaaattactgggtggg

SEQ ID NO: 569 - DNA, 401 bp, Homo sapiens
tgaaagcctctacgtctttatcttgttcctcaagattcttagggcagtgcgtgtgggtcaggggtaggtrtgtctgggaattaagagtatctagttgatttagtagctatatttctcttctttagcctgtttattgggaaatgaaagacaatttaggctatttcattttcagtcagtgtctgttatgaattcattggaaayagcaatgtgaaaagaggaatgaatattgtagatttctttcattgtcatatttgtaaattactgggtgggatttataaacaaattattgactaattatgaacaaactgttgtttttttcttttcaatcaatatgaacaatcaagtgacctaacamatttaattttaaaaatagatttgaaaggtatatagtagttaaaaca

SEQ ID NO: 570 - DNA, 401 bp, Homo sapiens
aggctatttcattttcagtcagtgtctgttatgaattcattggaaayagcaatgtgaaaagaggaatgaatattgtagatttctttcattgtcatatttgtaaattactgggtgggatttataaacaaattattgactaattatgaacaaactgttgtttttttcttttcaatcaatatgaacaatcaagtgacctaacamatttaattttaaaaatagatttgaaaggtatatagtagttaaaacaaggccccttgattcagattgcctgagttcatatctcaaataggctacttttttgtggtgtgcctttaggcaggatgcctcagtttcctcatatgtaaaaaagaaatgttaatagcagcttaccttgtggggttgttgtgagtgggtcaaatgac

SEQ ID NO: 571 - DNA, 401 bp, Homo sapiens
taaatcatgccagtcaggaaaaggggtacattggttattctatttataacattacttgagtatttataacaacaagtaaacaaaacgttttttagaaaaagaagagattactgtgttgtacaaatattactagatgggtaatttctctcctttttttccaatgtattccagaacccccatggatatcaaaattaaatgctsaaatcccttacataaaatggcatagtatctgtatactttaagcagattacttataatacctaatataatgtgaatgctatgtaaatagttgccatactgcatttttaaaattaatattattttttaatattttaacctttttttttttttttttttttttttttttttttttttttgagasggagtctygctctgtcacc

SEQ ID NO: 572 - DNA, 401 bp, Homo sapiens
gatatcaaaattaaatgctsaaatcccttacataaaatggcatagtatctgtatactttaagcagattacttataatacctaatataatgtgaatgctatgtaaatagttgccatactgcatttttaaaattaatattattttttaatattttaacctttttttttttttttttttttttttttttttttttttttgagasggagtctygctctgtcacccaggctggagtgcattggtgcaatctcagctcactgcaacctccacctcccaggttcaagcaattctacctgcctcagcccccaagtagctgggattgcaggcacaggccaccacacccacctaatttttgtgttcatagtagagacggggtttcgccgtcttggccaggctggtctcaaa

SEQ ID NO: 573 - DNA, 401 bp, Homo sapiens
aattaaatgctsaaatcccttacataaaatggcatagtatctgtatactttaagcagattacttataatacctaatataatgtgaatgctatgtaaatagttgccatactgcatttttaaaattaatattattttttaatattttaacctttttttttttttttttttttttttttttttttttttttgagasggagtctygctctgtcacccaggctggagtgcattggtgcaatctcagctcactgcaacctccacctcccaggttcaagcaattctacctgcctcagcccccaagtagctgggattgcaggcacaggccaccacacccacctaatttttgtgttcatagtagagacggggtttcgccgtcttggccaggctggtctcaaactcttgac

SEQ ID NO: 574 - DNA, 401 bp, Homo sapiens
tatttttccaatatttttgatctatgattggttgaatttgtggaagccaaacccacagacatggagagccagctgtgtattgttattgtcatgtcttttattctcccctgttcttttctgcctaaatgccttaggtacttctttacagagttagatagcatttaccattgataccacccagagtggtgtggtttgcttctyctgaccctttcatgagcaaagctggtttcaggggaaactcagggatctgaacwgttagtaacactgattagaaatgcagcagttttattcaggccttggttttattgaccatttttggttggctcttatctctgtgactgatcatgtatgcgtatttcaaatggataaataaactaaaaagtgtttaatactccaaaatg

SEQ ID NO: 575 - DNA, 401 bp, Homo sapiens
cacagacatggagagccagctgtgtattgttattgtcatgtcttttattctcccctgttcttttctgcctaaatgccttaggtacttctttacagagttagatagcatttaccattgataccacccagagtggtgtggtttgcttctyctgaccctttcatgagcaaagctggtttcaggggaaactcagggatctgaacwgttagtaacactgattagaaatgcagcagttttattcaggccttggttttattgaccatttttggttggctcttatctctgtgactgatcatgtatgcgtatttcaaatggataaataaactaaaaagtgtttaatactccaaaatgattagaagtgtattgttaaataccaaaaagaaaataattctggggtgtttcag

SEQ ID NO: 576 - DNA, 401 bp, Homo sapiens
tagaaatgcagcagttttattcaggccttggttttattgaccatttttggttggctcttatctctgtgactgatcatgtatgcgtatttcaaatggataaataaactaaaaagtgtttaatactccaaaatgattagaagtgtattgttaaataccaaaaagaaaataattctggggtgtttcagcatgttattctgttarcrtagttcacgttgagtgtttgtattcatttgttgtttgtttgtttgtaagtaacaggttttgactaaaattccacggactgtggaacarcacacactggggtctatcggagggtggaaagtgggtggagggagtgggtcaggaaaaataactaatgtatactaggcttaatacctgggtgataagatagtctttacaac

SEQ ID NO: 577 - DNA, 401 bp, Homo sapiens
gaaatgcagcagttttattcaggccttggttttattgaccatttttggttggctcttatctctgtgactgatcatgtatgcgtatttcaaatggataaataaactaaaaagtgtttaatactccaaaatgattagaagtgtattgttaaataccaaaaagaaaataattctggggtgtttcagcatgttattctgttarcrtagttcacgttgagtgtttgtattcatttgttgtttgtttgtttgtaagtaacaggttttgactaaaattccacggactgtggaacarcacacactggggtctatcggagggtggaaagtgggtggagggagtgggtcaggaaaaataactaatgtatactaggcttaatacctgggtgataagatagtctttacaacaa

SEQ ID NO: 578 - DNA, 401 bp, Homo sapiens
aaatggataaataaactaaaaagtgtttaatactccaaaatgattagaagtgtattgttaaataccaaaaagaaaataattctggggtgtttcagcatgttattctgttarcrtagttcacgttgagtgtttgtattcatttgttgtttgtttgtttgtaagtaacaggttttgactaaaattccacggactgtggaacarcacacactggggtctatcggagggtggaaagtgggtggagggagtgggtcaggaaaaataactaatgtatactaggcttaatacctgggtgataagatagtctttacaacaaacccccatgacacaagtttacctatataacaaacctgccattgtacacctgaacttaagtaaaaaaaaaaaaaattaagtcatgtaga

SEQ ID NO: 579 - DNA, 401 bp, Homo sapiens
aactagtaagattaatctacaacccaggcttctgactctatttcaacattcttctcataatgtcattgaggttacacttaataaacaacgttaaacactctctcttttaaaaaaaattgttggctatacatgttggctcacgcctgtaatcccagcactttgggaggctgaggcaggtggatcaccagagttcaggagttygagaccagcctggccaacatggtgaaaccccgtctctactaaaactacaaaaattagctgggcatggttgcaagtgcctataatcccagctacttgggatactgaggcaggagaatcgctggaacccgggaggcagaggttgcagtgagctgaaatcgcacattgcmctccagcctgggcgacaagagcaaaacttcatc

SEQ ID NO: 580 - DNA, 401 bp, Homo sapiens
ctgaggcaggtggatcaccagagttcaggagttygagaccagcctggccaacatggtgaaaccccgtctctactaaaactacaaaaattagctgggcatggttgcaagtgcctataatcccagctacttgggatactgaggcaggagaatcgctggaacccgggaggcagaggttgcagtgagctgaaatcgcacattgcmctccagcctgggcgacaagagcaaaacttcatcccctcccccccaaaaaattgttaactactacaagcataaatatgaatatctacttacctgcatttctgaagctagaccataagtattaacagtgcttatatctacagtccctggcagatagtcggtgtaagaaatatagattaattgaatgaatcatatgatcatgg

SEQ ID NO: 581 - DNA, 401 bp, Homo sapiens
gcctgggcgacaagagcaaaacttcatcccctcccccccaaaaaattgttaactactacaagcataaatatgaatatctacttacctgcatttctgaagctagaccataagtattaacagtgcttatatctacagtccctggcagatagtcggtgtaagaaatatagattaattgaatgaatcatatgatcatggttaagkttcttcttttgtgcgttttagcatttttaaatttttacattgatcatgtattgcttttgaaattttaaaaaacctggcaaaatrtaattacgatagaaactgacatcaaaaagctttgtagctgaaatagtgtaattttacactgagtttgaaacttctgatatcaggaactttgatgagcctaatacaggtgctatacg

SEQ ID NO: 582 - DNA, 401 bp, Homo sapiens
cctgcatttctgaagctagaccataagtattaacagtgcttatatctacagtccctggcagatagtcggtgtaagaaatatagattaattgaatgaatcatatgatcatggttaagkttcttcttttgtgcgttttagcatttttaaatttttacattgatcatgtattgcttttgaaattttaaaaaacctggcaaaatrtaattacgatagaaactgacatcaaaaagctttgtagctgaaatagtgtaattttacactgagtttgaaacttctgatatcaggaactttgatgagcctaatacaggtgctatacgggatgaagtgaatatgcttagaatttttgatgaaaacaaatctgactaytcaggtttctctatgagaagggtaggcagtttgat

SEQ ID NO: 583 - DNA, 401 bp, Homo sapiens
tattgcttttgaaattttaaaaaacctggcaaaatrtaattacgatagaaactgacatcaaaaagctttgtagctgaaatagtgtaattttacactgagtttgaaacttctgatatcaggaactttgatgagcctaatacaggtgctatacgggatgaagtgaatatgcttagaatttttgatgaaaacaaatctgactaytcaggtttctctatgagaagggtaggcagtttgatttgtaattatgggaagctgaatgtgaggcttggatgaggctttgtcagtatcagaccagctccttcctattgggggctgaattcccttgggctctccatcagagagaccaacaggaagcaatcatgtagttcttccaacacactcagaagtcagtaggtccactc

SEQ ID NO: 584 - DNA, 401 bp, Homo sapiens
cataggttccctcccagtggtaatgagtgagttcttactctgttagttcatgcaagaattgatggtttaaaagagtctggtgattctctcccctctctcctgcctgtgctctcaccatgtgacatgtctattcctccttcaccttccagcatgattgcaagcttcctgagttcctgaccagaagcagatgctggcaccacrctttgtgtatagcctttagaaccatgagccaaatcaaccacttttctttatgaattattcagtcccaggtattcctttatagcaacacaaaacaggcaaataccggagcaacagatcagaataaataacgctgagaggacctgacctgatttgctrtaggtattgttctagggtagcccctggtatccattgaagactct

SEQ ID NO: 585 - DNA, 401 bp, Homo sapiens
gcaagcttcctgagttcctgaccagaagcagatgctggcaccacrctttgtgtatagcctttagaaccatgagccaaatcaaccacttttctttatgaattattcagtcccaggtattcctttatagcaacacaaaacaggcaaataccggagcaacagatcagaataaataacgctgagaggacctgacctgatttgctrtaggtattgttctagggtagcccctggtatccattgaagactctgaccgtgagctctgcctgcattaatataactggaccaaaggaaacagaactttagttttatgaatgggtgtctctccaaacaatttttcctggctgagctttgttcattaacatttttcaatttctaaagaacaaataatctccatttctcttttt

SEQ ID NO: 586 - DNA, 401 bp, Homo sapiens
attaatgactcattctctctgttgagtgagggcttattccagctggctcgcgctattctgtgtgtatggattctgtcagcagggttgaaataagatgttaactggcagttattcattaatttacagcaagaacaatgacttgactctatgtcaaccatttctgaaacattttgactaacatttttcctgttgcttagaackgaacttaaaagctgggacaggcatatggaaagaagcaaggatccccagttatgctgattggaactaggactaatggttttaacacagaatgtttatgcatgtagaatgaaatacacacacacacacacacacacacacacacacatacacgcacatacaaggggtcatactttatgtttgcattttcctctaaaagtatc

SEQ ID NO: 587 - DNA, 401 bp, Homo sapiens
ttttttcatcatagtttgtttaaaagataaagcagatattataattattttctttacaggtgggaatgagttaaacaataattaactgaacaaaagcaatgtccaggtactgcaaaactttacataaattactcctattcattttcacagcaaccctctgaagtaaatggtattatcccaacttacagatgtggaaactartactaattaacttacctagaatcgaggtggcagagccaagacacgaattcaagtttctcttcctcaaatttaacattctttcttgtacaaatgtaaatgttctttaaaaatgaatacataatggcaggattcatatcaattttctgccagaattaccatgtttacctgaagtaaaatatgctcataaacaaagcagaaag

SEQ ID NO: 588 - DNA, 401 bp, Homo sapiens
cataaacaaagcagaaagtgcagctggtgcttacatctaggatgattaactggcatgtacagaatttttttttccttcaattgcaaagtgaatgcagtaaaattacagggcaatgggtttcttcccacacaagacaaggtgatctgaatgatatagaagagaaatgccacatgtggaaataatatatcaaggatttattaygtgtctgtggtcattcttaaggtcatttttgatgtctacacatttcagcatttgagaagttgtatattacatgcatacaaacccatattcaaatatacaattggctaaacaagtatttgttttaataaagtagtartaataaaatatttatagcaaaggrgacaagactcaggactgagaggaaaaactcaattaaaaaa

SEQ ID NO: 589 - DNA, 401 bp, Homo sapiens
aggtgatctgaatgatatagaagagaaatgccacatgtggaaataatatatcaaggatttattaygtgtctgtggtcattcttaaggtcatttttgatgtctacacatttcagcatttgagaagttgtatattacatgcatacaaacccatattcaaatatacaattggctaaacaagtatttgttttaataaagtagtartaataaaatatttatagcaaaggrgacaagactcaggactgagaggaaaaactcaattaaaaaaaagacaacaatacttaaatctcttgatgcatctacttagcaatgtctacaatagcttttttaacactatcagaatatagagcataaattataatgtttatcctgcttttaaaggaaaatttttctcttatgcaatc

SEQ ID NO: 590 - DNA, 401 bp, Homo sapiens
gaaatgccacatgtggaaataatatatcaaggatttattaygtgtctgtggtcattcttaaggtcatttttgatgtctacacatttcagcatttgagaagttgtatattacatgcatacaaacccatattcaaatatacaattggctaaacaagtatttgttttaataaagtagtartaataaaatatttatagcaaaggrgacaagactcaggactgagaggaaaaactcaattaaaaaaaagacaacaatacttaaatctcttgatgcatctacttagcaatgtctacaatagcttttttaacactatcagaatatagagcataaattataatgtttatcctgcttttaaaggaaaatttttctcttatgcaatcatggtgggagaaaagaattcttaa

SEQ ID NO: 591 - DNA, 401 bp, Homo sapiens
taacactatcagaatatagagcataaattataatgtttatcctgcttttaaaggaaaatttttctcttatgcaatcatggtgggagaaaagaattcttaacgtgattatttgtctcatattttattttaggattctgttagtgtttttaggattctatcaatgcaaggtgtaagaacatgtcctggcagttgaaggaaagrctaaggaaaaagatgaaagagaagtgtcgcatcccttaccctccttttaaagaaatgctgaagttgctgagcagaargtgccacagtcatgtcccttaatttatccctcaaccttttccagaagtaaagtgactacacctaagctcagacagtgacagtcgtgggagaaaagctttatagraacagtgataggaataaaa

SEQ ID NO: 592 - DNA, 401 bp, Homo sapiens
tggtgggagaaaagaattcttaacgtgattatttgtctcatattttattttaggattctgttagtgtttttaggattctatcaatgcaaggtgtaagaacatgtcctggcagttgaaggaaagrctaaggaaaaagatgaaagagaagtgtcgcatcccttaccctccttttaaagaaatgctgaagttgctgagcagaargtgccacagtcatgtcccttaatttatccctcaaccttttccagaagtaaagtgactacacctaagctcagacagtgacagtcgtgggagaaaagctttatagraacagtgataggaataaaagtgtgtgcactgggatagatgtattttttaattacagaagtaactactaatctatataagagaggctccttccactc

SEQ ID NO: 593 - DNA, 401 bp, Homo sapiens
cctggcagttgaaggaaagrctaaggaaaaagatgaaagagaagtgtcgcatcccttaccctccttttaaagaaatgctgaagttgctgagcagaargtgccacagtcatgtcccttaatttatccctcaaccttttccagaagtaaagtgactacacctaagctcagacagtgacagtcgtgggagaaaagctttatagraacagtgataggaataaaagtgtgtgcactgggatagatgtattttttaattacagaagtaactactaatctatataagagaggctccttccactctcagagcttccaacttaaccatctgtgaagagtaggtccttcaaaaccaactgtagcggcaaagttctgagrtgatatttccagactcagcagataggaacagg

SEQ ID NO: 594 - DNA, 401 bp, Homo sapiens
acagtgacagtcgtgggagaaaagctttatagraacagtgataggaataaaagtgtgtgcactgggatagatgtattttttaattacagaagtaactactaatctatataagagaggctccttccactctcagagcttccaacttaaccatctgtgaagagtaggtccttcaaaaccaactgtagcggcaaagttctgagrtgatatttccagactcagcagataggaacaggcatgctaggtgagatatggcagggaatattagtcagggttctccagagggacagaaccaatttgtgtgtgtgcgtgtgtgtgtgtgtgtgtgtgtgtgtgtgtgtgtgtgtgtgtgtgacagagacagacagaaagagagtgctttagtttaaggaattggctcacaa

SEQ ID NO: 595 - DNA, 401 bp, Homo sapiens
gagaggtcagtcttttgttctattcagatcttcaaccgattgaatcagccccactcaccttatggaggacaatttgcttgactcgaagttcattgatttaaatgtaaatcttgtctgaaaacaccctcctagaaatattcagaataacgtttgacaaaatatccagggaccagggaccatggcccagccaagttgacacaytgaactgaccattacaagtctagttggcacccatatacatctccttaagccattcttaatctccaaatgtggtcacattctgaggaactggtggttasagcttcaacatatgcattttgaggagatacagtgtagtccacatcatggaggtagccctagaatttttttgtttccattcctattggcagagacaattgagg

SEQ ID NO: 596 - DNA, 401 bp, Homo sapiens
taaatgtaaatcttgtctgaaaacaccctcctagaaatattcagaataacgtttgacaaaatatccagggaccagggaccatggcccagccaagttgacacaytgaactgaccattacaagtctagttggcacccatatacatctccttaagccattcttaatctccaaatgtggtcacattctgaggaactggtggttasagcttcaacatatgcattttgaggagatacagtgtagtccacatcatggaggtagccctagaatttttttgtttccattcctattggcagagacaattgaggaaaagggaaagttccctttcatttattttactctcctgcacatctaatctttaaggagagaatagaatgagagttggggcacaaaacaaggattgaag

SEQ ID NO: 597 - DNA, 401 bp, Homo sapiens
tcatggaggtagccctagaatttttttgtttccattcctattggcagagacaattgaggaaaagggaaagttccctttcatttattttactctcctgcacatctaatctttaaggagagaatagaatgagagttggggcacaaaacaaggattgaagggcagctgacttgagtccacgtagccccagaacaaagcaaaggracattagattagtggggtagtagagattaaagaagtaaacagaattgaaactggcagaagatagggtcattgtagagtggaaaaacatatctgaaacatggttgttaagtcataagctaatatttggaaagacagactccacttacttttttccaatagatatatatttactaaaatcttgggaaagctaagcttatgat

SEQ ID NO: 598 - DNA, 401 bp, Homo sapiens
aatttttattttaggttccagggtacatatgcagatttgttatataggtaaactaatgtcataggggtttgtaatacaggttacttcatcacccagggattaagcctgttacccaataggtattttttctgatcctctccctcctcctaccctccaccctccaccctcaagtaggccccagtgtctctttttcacctctaygtgtccatgagttttcatcctttagctcccgcttattagtgagaacatgtagtatttggttttctgttcatgtgtcagtttgctaaggatgttggcctccattcttgccatgaaaaacaacaggaaaataaagcactacccttgagcatgcctctagaacttgaggttcaagaacaacagaagagtggcagaaaactata

SEQ ID NO: 599 - DNA, 401 bp, Homo sapiens
taccaggtgatggttaggaaacagaaaattcctgaagcatctcttctttttaatgaagtatcaaaaatactgttttattaaaatcgggagaaaaaaggctttaggccaagtgtgttgggttggccttgcaactctacttcggttacaaatttaaaggccaaagagttagagattgtgtatatgggtatgtgtgttgcaggktggggtgtgggacatatcaatacaataggtaaaatgaatggtggattgtgtctgggataatgtggcatattttatctcaaatcccaaccttatctcccaataggagatttggatcatgagcaagatttggcttaggctagttttcaattcccaggattccagctccttcatagcaccacccttatgcttactaatccctt

SEQ ID NO: 600 - DNA, 401 bp, Homo sapiens
gatgactgacaaaatttttgaaagtaatagagagaaactgaggcataaaatttacctgaaagcagtcctgtttaaattggacaaaataattaccttttcttacatccctcttttagagttttcctaatatcatttaatacatagatagtactagaaagaaaaagacattttaaattaagaccaatgtgaagcattataccmatttagtatcattttgcccattacccttatagaaactaaaaatagaatgagtgctcagagtttgtactgtaactgcctgccacttacatgggataactatttttagttccatcgtccttattaaaggctttcattatgagttcatttatggaaatgttatctcacagagttttttttggagacttttctgagatctcaaa

SEQ ID NO: 601 - DNA, 401 bp, Homo sapiens
gaaacatgattagaacatagtcatttagtttcccagcaaatgctgatcctttccaggaaagttctataaataaggaaccaaagctggttgtcagtaatttgaagtagctgggttggaccgtgaatattaatatgtaaattatagcttgtgccatctatacacaaccaggattgtatgcatatcttcccatggtttattttmagtctgaatttgcatacaaacactggtctaattgagtttttaaaaaaaattcttaagagatgccatgtgttacttaaagatgttttgttttgaaactttgtgataggtaagatccactaatgtttgtaaaatttaccatttgtaggaaatattctattctcagtaattcctggtgaaagtggtaggtgggttagagatca

SEQ ID NO: 602 - DNA, 401 bp, Homo sapiens
cttaatgctgagtatattgggactcttgtaaatggacattttgttcatggatattttgttttagcaatttaaagaatgttaactagcttaatattttagagtgaacattttaaagtgataaagaaaaataagaaactttcttatctcaattaaaaatatatatgtatttttggtccacacaaatcacatcacccaaataaktcagagcactttgctagaaaaggcaagacaaggtgtttctgagagtgtctccgcatttagatagactatttagttccatacttagagatcatccactagggtttctttgagcttggtgaagaatattcagcaacttgcctaagctctgggaatgtgagcatcagttatgaatataggtcatctcagtttgtgcacagcac

SEQ ID NO: 603 - DNA, 401 bp, Homo sapiens
cagagcactttgctagaaaaggcaagacaaggtgtttctgagagtgtctccgcatttagatagactatttagttccatacttagagatcatccactagggtttctttgagcttggtgaagaatattcagcaacttgcctaagctctgggaatgtgagcatcagttatgaatataggtcatctcagtttgtgcacagcacaytttctgtcagtccaatataaacttgtatgagtagatctgtttattgtgataactacaacttatattaacttgttgacatgctttttctaacttattttcttgggtctgcatttttcaaagatcaaaatttctgcatcttcagcacaagtagattgaagaacacataatacggatagtgattaggaacattcaggcatggg

SEQ ID NO: 604 - DNA, 401 bp, Homo sapiens
aataagctctgcaacttacatttttatatgggaagaaataatgagtcagtcttcttgaagttttttacattattatagtaagaacatttaagatgagatatacccttttaacactttacattttaagtgttcaatatagcattgttaactctagataggacgtttcatagaagatcttagcatctgacgtaactgaaactrcatgcatcgaatagcatctccccatttctcccacttcccagccccaggcaaccaccattcattttactctctgcttctgtgagtttgactattttacatacctcattgataatggtttggatgtttgtcctctccaaatcgcatgtagaaacatgattcccattgttggagatggggtctaatgggaggagattggatcg

SEQ ID NO: 605 - DNA, 401 bp, Homo sapiens
ccagccccaggcaaccaccattcattttactctctgcttctgtgagtttgactattttacatacctcattgataatggtttggatgtttgtcctctccaaatcgcatgtagaaacatgattcccattgttggagatggggtctaatgggaggagattggatcgtgggggcagatccctcatgaatggcttagtaccatctscttggtgataagtaagtttttgctctgagttcatgtgagatctggttgtttaaaagtgtgtagcacctccccaaccgatctcttccccttttgccttccaccatgattatgagcttcctgaggccctcactagaaatagatgctggagccgtggtggtacagcatgcaggactgtgaatcaattaaacctcttttatttc

SEQ ID NO: 606 - DNA, 401 bp, Homo sapiens
gctcttgtatattgacaagagcataaatctatcaacagccaggttcatacatagagtccacctcttaaaggttataagatactgggcaagtcatttcatttctttaaacctgtttcctcatctgtgaaatgctgatagaatcataccttacatagatcagatgtaaataaaatagtcgtaagttagcgctcaggaaattayagtattctgtgcaaatcttattaactttgattttgtttcatatattgataaatttacatctagctgaaaatacattgaatcattgtcatggactaaattttaatatgtcttaggaaaagagtccgggttgaagtgcagtggtgcgaygttggccccctgcagcctccgcctcacaggttcaagtgattctcctgcctcag

SEQ ID NO: 607 - DNA, 401 bp, Homo sapiens
ttacatagatcagatgtaaataaaatagtcgtaagttagcgctcaggaaattayagtattctgtgcaaatcttattaactttgattttgtttcatatattgataaatttacatctagctgaaaatacattgaatcattgtcatggactaaattttaatatgtcttaggaaaagagtccgggttgaagtgcagtggtgcgaygttggccccctgcagcctccgcctcacaggttcaagtgattctcctgcctcagcctcccgagaagctgggattataggtgcatgccatcagacccagctaatttttgtatttttagtagagatggggttttatcatgttgaccaggttgttctcgaactcttgacctcaggtgttctgccggcctcagcctcccaaagtg

SEQ ID NO: 608 - DNA, 401 bp, Homo sapiens
tgccggcctcagcctcccaaagtgctgagattacaggcgtgagccactgcaccggtccaggacaagaatatttttgaaactatgagctttatcatcagagacattaaaacttcagaaggaaagagacctttgagttcttctgagccaactccttccttttatcactaccaacaacatgaagtcagagggaaatgacttgcmtacagtaagatgagcaggaagaagtgaaagcagattaggggctgaggtcttcttagtttatgtccagagatctttccacttcacccaccatactctacattagtcactaccacgaccatcatcatcattatgaccaaaattaaatctaaacaacttttcaccaagtaattccattttcatgctaaagatcaggcagttca

SEQ ID NO: 609 - DNA, 401 bp, Homo sapiens
ggggagaagggacaggaagtactgagatctgaaagcaaattgcctaacatttagaggtgagaatgtgaaatgaggccaaccagggctggtgcagagccagaacaagggaggtcagaaagctaaggtgaaattctggaaataaatatgatgagagcttattgtaggggagacttttgggggactatggcctcgatctgatgkgtctgcttgtccccagtgctccttcaaacatgctccttgaagcttcatgcctgccttagacagccagagattgaaaatgaacatatattttgaaaacaaagacactaagaccattcacaaaaattcaagaagtaattttttaaaaaaaatacagtaacatttaaaaaatatatgttatttcacaacatatgtaaaaccat

SEQ ID NO: 610 - DNA, 401 bp, Homo sapiens
agagatcagactgttattgtgtctatgtagaaagaagtagacgtgagagactccattttgttttgtactaagaaaaattcttctgccttgagatgctgttaatctgtaaccctagccccaaccgtgtgctcgcagagacatgtgctgtgttgactcaaagtttaatggatttagggctatgcaggatgtgcatagcccgaraaacacccacaggtgtggaggggcaggccaccccttcaaaggcaagtgtcatgaatgaagaaattaaggatagcaacaagtataaggcctatgtcacttgcctttggacaaaggtccctttatatttcaatcctggaaagtgaaatgaaaaaactagtgctaaaattaggatcaaagatagtacaggaaagtgtatttaa

SEQ ID NO: 611 - DNA, 401 bp, Homo sapiens
acaataaaacaaaatccatgagataattcatttagtggggcaaaaaacgtttgttggtctttgttttgcttggttttgttttatatgtacaagggcataaagttgacttaggatgtggagttgggaaggagagtagtttggataagatctttgaaaggttgcttatgggtatcctttcctggtcatcaagatgtggatgtrcctctcttgaaattcttactcactgcatctttcagcctggatatgatgcaaaaacatgagcggtgacttcacatttaggtttgaaagcagagcttccctcttattggctgatggttcctgaggatgtctgcagcagagtggcaggacaatctagcagaaatattttccacttaaagagatagggggtttgtgtttggatt

SEQ ID NO: 612 - DNA, 401 bp, Homo sapiens
acttccttagagcaaaggaggggcagccccattaccaaataccacttttgcccaggcttttgtgacatgcagtgctcctgcccagcatggcaccttattttgacaaggaccttgttatctttccaccaagttatcacttgaaatgataatatagcttgtatgttgttcccaagctgtcgtatattttcctggttgtttgawtttaacaatgagaataataaggtttaatactcctccctaagaaaagatttgcttatttcccaatttgaaattactttgctaagagggatataatgagttctatagtgaaacaagtatgtgttttatcctaatttctgaaattattcctgaaaattcaagtccattgtttgtctcccaccctatcctttggttctgtcacc

SEQ ID NO: 613 - DNA, 401 bp, Homo sapiens
agcctcccaagtagctgggattacaggcacacgccatcatgcccagctaatttttgtatttttagtagagacagggtttcaccatgttggccaggatggtcttaatctcctgacctcgtgatccacctgcctccgcctcccaaagtgctgggattacaggcgtgagcctctgcgccgtgccattttcagcattttttgatrtcagttatgggttcattgttttcaatataagataacatgagcagagactgtgtaggtgggattgagagtgaagactgggctcattgacaacctctcatcatctcgtcaagcagagtttcccatatcctctgaatctatgcctgtgtaactccaaatattagcataaatataaaaaattcatccatttggatattttatct

SEQ ID NO: 614 - DNA, 401 bp, Homo sapiens
atggctatgcaaatttccattcaacagcgtataaaagttccattttctcggcatctttgtcagcatttgtaaaattttttttgtctttttgataataaccatactaactagggtaagataatacctcattgtggttttgatttgcatttcccaaataattccaggaaagagatgacattgggttagattagaggggaaccrggggatgagtacaaaagatgaggagaagttagaatctattttagaaacagagtcaacagaactcaccaaatagatgcagttaaggaagcaaggaaagtaactaagggtaacacctgtttgtggcttaagtaactgaataaatgggggtaagacaatatgagacagcaaatatttggggaatattttatgtggtatttttg

SEQ ID NO: 615 - DNA, 401 bp, Homo sapiens
agtgtggcatctcatgtattctaaagtatatggtgaccatctaaggaagttggtttgaatgtgcaggtctagcaaagaacatgccctggatataaaacctaggaatcaccatctgatcgaagatggagatgaatgacttcaccctagggcaagaaggacttaagaagaataggaaggatggcaggaatggaggaaaacatkktggatggaaagatgagacactgaaacaatttgaagattggaaggtgagagtctgaggtccaaagctttacaccagttgttgaagaaccttgatcacaggccagccaggacctcaaaggctcaagagaaatgatgacaaggtttgcttggcttatttagagctgggctatagagcgggaagattgtggttaaatcttagc

SEQ ID NO: 616 - DNA, 401 bp, Homo sapiens
gtgtggcatctcatgtattctaaagtatatggtgaccatctaaggaagttggtttgaatgtgcaggtctagcaaagaacatgccctggatataaaacctaggaatcaccatctgatcgaagatggagatgaatgacttcaccctagggcaagaaggacttaagaagaataggaaggatggcaggaatggaggaaaacatkktggatggaaagatgagacactgaaacaatttgaagattggaaggtgagagtctgaggtccaaagctttacaccagttgttgaagaaccttgatcacaggccagccaggacctcaaaggctcaagagaaatgatgacaaggtttgcttggcttatttagagctgggctatagagcgggaagattgtggttaaatcttagca

SEQ ID NO: 617 - DNA, 401 bp, Homo sapiens
ctgatgacgctgcatctcagtcataaaaacttcagggaatctgaaagaaataataatgcgccatggtattttgagcttatcaccacaagaaatactctgtaattgcatcaaatgattataaatggcatattttagggacataataagcaatgcaaaggacaggtctgcttattagtgccaaaatttgtatttattcccatrttgctttttttttcctaggcattttccggcatctcatttctgactattaaattataccccaaatagaatatgtaactacatgtaaccaacctattttggtctacattaagtgcagcagcataaatagaaactgaaaataatcagaagcatttagaatttcgtttttattcatctgatttacttggccttttgtctgggat

SEQ ID NO: 618 - DNA, 401 bp, Homo sapiens
attgtatctacaaatagtttagctgaagtgagcttttcagttattgattttaaatcataagtttaattcgtcatcaaggcaacaacaaatgtgatgtttggggcagatgcaaagttgaagtatgtctaaagaaatagcacgctagttgcgtttaatgtggaaggtaaattataacaaaacaaactaaaaccccacaaactstaaagattttcccttatagttatagaaattaggaaatgccctawtgtgcatctttccttcccaactgtacygagattttgaattttttataatttgtactaatatgtaactagaccagatataatctgttgaggctttcttgtgatggaaagcaggtgaaatcaattttcagttgaaatatgcttttcagttcactatat

SEQ ID NO: 619 - DNA, 401 bp, Homo sapiens
tgattttaaatcataagtttaattcgtcatcaaggcaacaacaaatgtgatgtttggggcagatgcaaagttgaagtatgtctaaagaaatagcacgctagttgcgtttaatgtggaaggtaaattataacaaaacaaactaaaaccccacaaactstaaagattttcccttatagttatagaaattaggaaatgccctawtgtgcatctttccttcccaactgtacygagattttgaattttttataatttgtactaatatgtaactagaccagatataatctgttgaggctttcttgtgatggaaagcaggtgaaatcaattttcagttgaaatatgcttttcagttcactatatgatgtttgtagggcttttttagagaagggctttgcatttagact

SEQ ID NO: 620 - DNA, 401 bp, Homo sapiens
catcaaggcaacaacaaatgtgatgtttggggcagatgcaaagttgaagtatgtctaaagaaatagcacgctagttgcgtttaatgtggaaggtaaattataacaaaacaaactaaaaccccacaaactstaaagattttcccttatagttatagaaattaggaaatgccctawtgtgcatctttccttcccaactgtacygagattttgaattttttataatttgtactaatatgtaactagaccagatataatctgttgaggctttcttgtgatggaaagcaggtgaaatcaattttcagttgaaatatgcttttcagttcactatatgatgtttgtagggcttttttagagaagggctttgcatttagacttgagcagtttagcaggcttcgtcggag

SEQ ID NO: 621 - DNA, 401 bp, Homo sapiens
actagaccagatataatctgttgaggctttcttgtgatggaaagcaggtgaaatcaattttcagttgaaatatgcttttcagttcactatatgatgtttgtagggcttttttagagaagggctttgcatttagacttgagcagtttagcaggcttcgtcggagggtaaatctggctgctggatctagttggaatgttttcytttcataagaagagttggagataaagtgattcttgctttcaaatacacttttaacaatacaaaagaataattgaagactttttcttttgagacagagtctcactctgttgcccaggatggaatgcagcggaacaatttcgactcattgtagcctcracctctcaggctcaggtgatcctcctacctcagcctcccaagta

SEQ ID NO: 622 - DNA, 401 bp, Homo sapiens
gtcggagggtaaatctggctgctggatctagttggaatgttttcytttcataagaagagttggagataaagtgattcttgctttcaaatacacttttaacaatacaaaagaataattgaagactttttcttttgagacagagtctcactctgttgcccaggatggaatgcagcggaacaatttcgactcattgtagcctcracctctcaggctcaggtgatcctcctacctcagcctcccaagtagctgggactacaggcgtgtgccaccacatctggctaatttttgtatgttttgtagagttggggttttgctatgttgcccaggctggtcttgaactcctgggctcaagctttcctccctccttggcatcccagagtgctgggattacaggtgtaagc

SEQ ID NO: 623 - DNA, 401 bp, Homo sapiens
tctcaggctcaggtgatcctcctacctcagcctcccaagtagctgggactacaggcgtgtgccaccacatctggctaatttttgtatgttttgtagagttggggttttgctatgttgcccaggctggtcttgaactcctgggctcaagctttcctccctccttggcatcccagagtgctgggattacaggtgtaagccacygatcccagcctaattgaagacttttgtatgttaggtgctaagtaatacaaaagtaaaagtgccactgtttctgtcctcaaggaatttacagtctggagaaggagacaaaatataaacaaacacactgataagtaaatgattacaaattgtgccaagtgccatgatagaaaagaattgatgtgcattatctctgtgctccc

SEQ ID NO: 624 - DNA, 401 bp, Homo sapiens
ttgatcatacccatcagtcttccaggtataccaaggacattggattgaatgtcacaggacctggattcaagccctgccatcgaatccagctgggtgtttctgggcttcagtttctgtatattcagtaatagtatcgaatattagtgggagtaatagcattgaatgccctccatgctcactggaacttcatccacaattacmatgtcttggtggctttctaagtttttttttaatttttaatttctaatttttgtaggtacacagtaggtgtctatatttatggggtatgtgagatattttgataaaggcatgcaatgcataataatcacatcatggaaaatggggtatccatctcctcaagcatttatcctttgtgttacaaacaattcaattatgttttt

SEQ ID NO: 625 - DNA, 401 bp, Homo sapiens
acaaacaattcaattatgttttttaagttattttaaaatgtacaaatacattattttggctatagtcacactgtcatgctattaaatgctaggtcttctaattattttttgtaccctttaaccatctctacctctccctgatcccccagtacccttcctatcctctggtaaccatccttccattctctatctccatgggtycagttgttttgatttttacattcagtaaatgagtaagaatacacaatgtttgtctttctgttcctggcttatttcacttaacatgatgaccacagttccatccatattgttgcaaataacaggatctcattgttttcatgaataaatagtactccattgtttatatgtaccacaatttctttgtccattcatgtgttgat

SEQ ID NO: 626 - DNA, 401 bp, Homo sapiens
ataaacactatatttaggctacctatatttatagaaaaatcttctttcttcaataataaattaatgttagcttactgtaactttctgacttaataaatgttttaatttttcaaaactttttgactctttttcaataatagcttgaaatacaaacacattgtacagctgtataaaaataatttctttttatcctcattctayaaacttttttgaatttttaaattttttaatataatttttaaaattttgttaaaaacaaagacacaaacacacacattagcctaggcccacacagggtcaggattgtcagtatcactgtcttccacctccacatcttgtcctactggaaggtcttcagggtaaataacaagcacgaagctgtcatctcctataacaatgcc

SEQ ID NO: 627 - DNA, 401 bp, Homo sapiens
ttgggtgaattcaaacatggccactttgtatgacaaattacatgcttctatttctgttccacccagggtttcttttgagcagtggaaattcatctggaaacttaatgttatcccactatagagagccattcttgatgtgccactaattctgccaaataggctgacttgactactctcttaggatacagaattatatgaagmaaaatagagttgagaaggaaaaagtacaaacgttgtgtgtgcatataacaaacagatgactgctttagacatatttggtctgtaaacacctgtggaatcttgcctgtgtctctaatttttccagattttgctcatgggagagacacaatttgttctttgaatgtagccattatattttaacatacatgctgatttaatca

SEQ ID NO: 628 - DNA, 401 bp, Homo sapiens
cacataggcacatcatctcaggaaggctcaggtagcatagaggcaagtgaattcagcctgagattacagtaaagacatgaatctgatagtctggcatttctggactcacactgatttcttgaagaaaagcccatacagttggaatcagtgccttaaattaggtttcttaatatgatgagctcataaaatatgtgttgtccygccttcttcagatgtgagagttgatgttacagagatctctttggtaatatgactattttaataaaatattcacaattaaaaatrtatagaagaaagcagcaaggaaagactagaactaatgattagagttgttgaaaatgcatacataatttactccctttttaaaaaaaatggaactgggctattctgttgtacataga

SEQ ID NO: 629 - DNA, 401 bp, Homo sapiens
gatagtctggcatttctggactcacactgatttcttgaagaaaagcccatacagttggaatcagtgccttaaattaggtttcttaatatgatgagctcataaaatatgtgttgtccygccttcttcagatgtgagagttgatgttacagagatctctttggtaatatgactattttaataaaatattcacaattaaaaatrtatagaagaaagcagcaaggaaagactagaactaatgattagagttgttgaaaatgcatacataatttactccctttttaaaaaaaatggaactgggctattctgttgtacatagacttttgtcaaaatcaaattaagaatactttactcagttttctttttcttcctttattcatctctgtaaatatgattttaaaggc

SEQ ID NO: 630 - DNA, 401 bp, Homo sapiens
tttttaaaaaaaatggaactgggctattctgttgtacatagacttttgtcaaaatcaaattaagaatactttactcagttttctttttcttcctttattcatctctgtaaatatgattttaaaggcccttgaaaacaaaataattatcttattaaaatttagttacatgttgtgtttaaaatgctaaagttttggccagcygcagtggctcacgcctgtaatcccagtactttgcccgagatgggcagatcatgaggtcaggagttcaagaccagcctgaccaacatggtgaaaccctgtytytactaaaaatmcmacaacaacaacaacaacaacaacaaattagccaggagtggtggtgcgtgcctgtaatcccagctactcaggaggctgaggcagga

SEQ ID NO: 631 - DNA, 401 bp, Homo sapiens
atctctgtaaatatgattttaaaggcccttgaaaacaaaataattatcttattaaaatttagttacatgttgtgtttaaaatgctaaagttttggccagcygcagtggctcacgcctgtaatcccagtactttgcccgagatgggcagatcatgaggtcaggagttcaagaccagcctgaccaacatggtgaaaccctgtytytactaaaaatmcmacaacaacaacaacaacaacaacaaattagccaggagtggtggtgcgtgcctgtaatcccagctactcaggaggctgaggcaggagtatcgcttgaacccaggaggcggaggtcgcagtgagccgagattgcgcaacagagtgtgactcagtcttaaaagaaaaaaaaaaattctraaatttatc

SEQ ID NO: 632 - DNA, 401 bp, Homo sapiens
ctctgtaaatatgattttaaaggcccttgaaaacaaaataattatcttattaaaatttagttacatgttgtgtttaaaatgctaaagttttggccagcygcagtggctcacgcctgtaatcccagtactttgcccgagatgggcagatcatgaggtcaggagttcaagaccagcctgaccaacatggtgaaaccctgtytytactaaaaatmcmacaacaacaacaacaacaacaacaaattagccaggagtggtggtgcgtgcctgtaatcccagctactcaggaggctgaggcaggagtatcgcttgaacccaggaggcggaggtcgcagtgagccgagattgcgcaacagagtgtgactcagtcttaaaagaaaaaaaaaaattctraaatttatcgg

SEQ ID NO: 633 - DNA, 401 bp, Homo sapiens
tgattttaaaggcccttgaaaacaaaataattatcttattaaaatttagttacatgttgtgtttaaaatgctaaagttttggccagcygcagtggctcacgcctgtaatcccagtactttgcccgagatgggcagatcatgaggtcaggagttcaagaccagcctgaccaacatggtgaaaccctgtytytactaaaaatmcmacaacaacaacaacaacaacaacaaattagccaggagtggtggtgcgtgcctgtaatcccagctactcaggaggctgaggcaggagtatcgcttgaacccaggaggcggaggtcgcagtgagccgagattgcgcaacagagtgtgactcagtcttaaaagaaaaaaaaaaattctraaatttatcggagaaaacaatt

SEQ ID NO: 634 - DNA, 401 bp, Homo sapiens
attttaaaggcccttgaaaacaaaataattatcttattaaaatttagttacatgttgtgtttaaaatgctaaagttttggccagcygcagtggctcacgcctgtaatcccagtactttgcccgagatgggcagatcatgaggtcaggagttcaagaccagcctgaccaacatggtgaaaccctgtytytactaaaaatmcmacaacaacaacaacaacaacaacaaattagccaggagtggtggtgcgtgcctgtaatcccagctactcaggaggctgaggcaggagtatcgcttgaacccaggaggcggaggtcgcagtgagccgagattgcgcaacagagtgtgactcagtcttaaaagaaaaaaaaaaattctraaatttatcggagaaaacaattgg

SEQ ID NO: 635 - DNA, 401 bp, Homo sapiens
aaaccctgtytytactaaaaatmcmacaacaacaacaacaacaacaacaaattagccaggagtggtggtgcgtgcctgtaatcccagctactcaggaggctgaggcaggagtatcgcttgaacccaggaggcggaggtcgcagtgagccgagattgcgcaacagagtgtgactcagtcttaaaagaaaaaaaaaaattctraaatttatcggagaaaacaattgggatctatttttagtctcaaatgtaggcatatacaaaaataatacatagtagttttctaagtactattagacatttgtttcccattttgccatttgctttcagtttacctgacatgaagataaaaatgatagctatttctcacttggcatttgaaagacaagagcaataagaaaccc

SEQ ID NO: 636 - DNA, 401 bp, Homo sapiens
tgctctgtaacatgattaagggcaattaacattgcaggtagaattaaagttactattttagtccatttgtgctgctataacaaaatgcctgagactgggtatgtataaagaacagaaatttgttttctgttctggagcctaggaagtccaagatcaaagtgccagcaggttccatcatctggtgagtactgcatcttcagrggggaggggaaaggaacagtatgttctcacctggcagaagaacaaaagagcaagctaccaaacactgccaagcctcttttatagaggccttaatcgcattcgtgagggagcagccctcatggcctaattacctcttaaaggctctatctcttaaaactactaggttggcaacacctgaatttaagagggggcataatcaa

SEQ ID NO: 637 - DNA, 401 bp, Homo sapiens
taataatttgtcaaggcagcaataaaaaaccaatgcagcaaaagacaataacgtctgtttaaccacacagtcacggaacatctattaactagcaacttattaaatacagcttactgctgcaacatctttggtgtaattaaaacatcctccatgaatcagagtgagaattatacttaagtgtctgccaattgccatgataakagaaaagcttatgatctctctactaagtaccttaggaagacaagggcccaatgatatgagcagtgtggtggaaccccaaacatcttcccactttcatgcacacatatcattcattctcctttttcccaaggttcgctgttagtatagaggcacaatagatcatgattagctctgggcatgttcacagtttagctgcctga

SEQ ID NO: 638 - DNA, 401 bp, Homo sapiens
atgccgcaaaaagtaaatgtttactccaagccaggtgcttggactctaaagaactctattaggcaagagtaagtggtttaattggctcaccttcattcaactgttagtatgttcctcataagtgcctgtcagagagaatcttttgtgtttcccttctaacagctggctcataaaaacataaactcatcttacaatgttaartaaggatcttttaattcctgttttctttcctccaatttgtattaatatgataggagagaaagaaagtgaaagcatgcttctatagctggctacttcatcaaacttaatggaaccatattttgtaattcattctataatttaagttttggtcattttatctcttaaagatgaattccaggccaggtgcagtggtttgtgcc

SEQ ID NO: 639 - DNA, 401 bp, Homo sapiens
ggtgtgatggtatatgcctgtagtcctagctactcaggaggctgaagtgggaggattgcttgagcccaggaggtccaggttgcagagagccatgatgatgccattgcactccagcctaggcaacagagcgagacactgtctcaaaagacacacaaacaaaaaaatatgaaaccctagctaaacactgtggactcaaaatamcctgtgaaatcacccaaccgtagtatttatctatgagaatgtttcaaagggagatatgtagttgtatgactatttcacgcagatatttgttattaataaaagactttgtggtcagcatgacgtgttagctacagttgaatccatgcttctttacattttgtggtttggttgttgtcgaatttactttccatgcattattt

SEQ ID NO: 640 - DNA, 401 bp, Homo sapiens
aaaagtttatgactagttgggtttggtctccattttgtattaatgtagttgggttcagtctccaatctgtatgtatgtagtttcctatcccagagagcaggacaagaccatataagctctatttatgtttcctttgactctttagctgaaagcctaggatgtaggacaagtggctaacctgttttagaactttcttcctasgctaacattctgaacttggccttgtggattttacctcttaaactgcaccaaaaaccatggaaacaaagggcttacagcagtgttagcctaatctgagccctctataccttcctatactgtggccacagcagtaaagctacgtggtcttgcaaaagaccttccaagagaaggttggctacagaccttgcttatcacaccat

SEQ ID NO: 641 - DNA, 401 bp, Homo sapiens
tgaaccctactctgttgggtggaatgtgtgtgtatctgcacgtgtgtgtgtgtgtgtgtgtgtgtgtgtgtttagaaattcaaaaaaaatgaggagatcttggtcttccatagagggaagactgcattatcaatagagtctttcttagcagaggatgaaggctcctgtagctcctaatcttcccatttgtgcacaaatacstgaattctgattaggttgaaatcaggaagacactcttttgctgcttagtggccacatctagagctaacaacattatcagtgggatggtgattcatggtttaagaacataccctcgccattccagctactcgggaagctgaggtaaaaggatcgcttgagcccagagtttaaggctgtagtgtgccatggtaacacataac

SEQ ID NO: 642 - DNA, 401 bp, Homo sapiens
tcattgatggtgtgtgatttcacaagctggattttatttcagaacacctgtcaaattcagagctgtctgaagcttctccaacatcattaccccagggctcccagttctatgcacatgtttttataatggcaggaaaaagaattcatatacgcatttgtgtgttagaatcagtggtgtgctggtgtaacaatcagctcctaragggtgaggcagggtgggtaggggatgtttagaaaaagtgggtatggagaagtccctgaattctagtttttgccaaattctgtgatgcaaatactcccaccacagccaatttcaaggttatttttcccagttacatttaatcagggccatacaagatgttacaagaaagaaaatgacaggaacccatgtggttcaactga

SEQ ID NO: 643 - DNA, 401 bp, Homo sapiens
acattttgcatccctttttgatgtctacaaatgtggcatttgtcagatgtgagatagttaagtgtgtgtgtgtgtgtgtgtgtgtgtatatatatactttatatatgtatatatacatatcctatgtgtgtgggtatatatatatatatatatatatatatatatatatatgaatgatgcatggagagatatctcttcccwtgcatccaaaatattcacaacttttcactaatatctgaataacatttgaaaaattgacaactcttctggctaaagatcagcatacacattcgttccacagagacttgtgccaaaatcttgctcagctcaaggggtactgcacaataaacaataagaaacttttataactccgactaatagaactcattgcttttccagtt

SEQ ID NO: 644 - DNA, 401 bp, Homo sapiens
ggcttttggacaaataacaggcagattctttggtgaagctttgttcatctgaaactcttccctgtcctctcttctccacttcatttttctgatgaggagaatggaagtttgtataaactagagtgctcaagcagcaggcagtggaagaggcaagacctccaagtagatctgcaagctctgaaccaagtgacctatctctargccatawtgaggaaggccaatgcarktttgcgatctctctacctcttcatttttccttttcctcctccccttccccttttgctctccccctcttcctctcaagagagtaatgtgctagtagtacctgatggtaccccagtgcttcctgccttcctcccttccacttcctgccttcctttctcccacttcctgccttcctc

SEQ ID NO: 645 - DNA, 401 bp, Homo sapiens
ggacaaataacaggcagattctttggtgaagctttgttcatctgaaactcttccctgtcctctcttctccacttcatttttctgatgaggagaatggaagtttgtataaactagagtgctcaagcagcaggcagtggaagaggcaagacctccaagtagatctgcaagctctgaaccaagtgacctatctctargccatawtgaggaaggccaatgcarktttgcgatctctctacctcttcatttttccttttcctcctccccttccccttttgctctccccctcttcctctcaagagagtaatgtgctagtagtacctgatggtaccccagtgcttcctgccttcctcccttccacttcctgccttcctttctcccacttcctgccttcctcccttcca

SEQ ID NO: 646 - DNA, 401 bp, Homo sapiens
ttctttggtgaagctttgttcatctgaaactcttccctgtcctctcttctccacttcatttttctgatgaggagaatggaagtttgtataaactagagtgctcaagcagcaggcagtggaagaggcaagacctccaagtagatctgcaagctctgaaccaagtgacctatctctargccatawtgaggaaggccaatgcarktttgcgatctctctacctcttcatttttccttttcctcctccccttccccttttgctctccccctcttcctctcaagagagtaatgtgctagtagtacctgatggtaccccagtgcttcctgccttcctcccttccacttcctgccttcctttctcccacttcctgccttcctcccttccacttcctgccttccccagt

SEQ ID NO: 647 - DNA, 401 bp, Homo sapiens
tctttggtgaagctttgttcatctgaaactcttccctgtcctctcttctccacttcatttttctgatgaggagaatggaagtttgtataaactagagtgctcaagcagcaggcagtggaagaggcaagacctccaagtagatctgcaagctctgaaccaagtgacctatctctargccatawtgaggaaggccaatgcarktttgcgatctctctacctcttcatttttccttttcctcctccccttccccttttgctctccccctcttcctctcaagagagtaatgtgctagtagtacctgatggtaccccagtgcttcctgccttcctcccttccacttcctgccttcctttctcccacttcctgccttcctcccttccacttcctgccttccccagtc

SEQ ID NO: 648 - DNA, 401 bp, Homo sapiens
ctggatcccttccttataccttatacaaaaattaattcaaggtgattaaagacttaaatgttagacctgaaaccataaaaaccctagaagaaaatctaggcaataccattcaggacataggcatggacaaggacttcatgtctaaaacaccaaaagcaatggcaacaaaagccaaaattgacaaatgcgatctaattaaaytaaagagsttmtgcacagcmaaagaaactaccatcagagtaaacaggcagcctacagaatgggagaaaatttttgcaatctattcatctgtcaaagggctaatatccagaatmtaacagtgaactcaaacaaatttacaagaaaaaaacaaacaaccccatcaaaaagtgggtgaaggatatgaacagacacttctcaaa

SEQ ID NO: 649 - DNA, 401 bp, Homo sapiens
cttccttataccttatacaaaaattaattcaaggtgattaaagacttaaatgttagacctgaaaccataaaaaccctagaagaaaatctaggcaataccattcaggacataggcatggacaaggacttcatgtctaaaacaccaaaagcaatggcaacaaaagccaaaattgacaaatgcgatctaattaaaytaaagagsttmtgcacagcmaaagaaactaccatcagagtaaacaggcagcctacagaatgggagaaaatttttgcaatctattcatctgtcaaagggctaatatccagaatmtaacagtgaactcaaacaaatttacaagaaaaaaacaaacaaccccatcaaaaagtgggtgaaggatatgaacagacacttctcaaaagaagaca

SEQ ID NO: 650 - DNA, 401 bp, Homo sapiens
ccttataccttatacaaaaattaattcaaggtgattaaagacttaaatgttagacctgaaaccataaaaaccctagaagaaaatctaggcaataccattcaggacataggcatggacaaggacttcatgtctaaaacaccaaaagcaatggcaacaaaagccaaaattgacaaatgcgatctaattaaaytaaagagsttmtgcacagcmaaagaaactaccatcagagtaaacaggcagcctacagaatgggagaaaatttttgcaatctattcatctgtcaaagggctaatatccagaatmtaacagtgaactcaaacaaatttacaagaaaaaaacaaacaaccccatcaaaaagtgggtgaaggatatgaacagacacttctcaaaagaagacattt

SEQ ID NO: 651 - DNA, 401 bp, Homo sapiens
ttatacaaaaattaattcaaggtgattaaagacttaaatgttagacctgaaaccataaaaaccctagaagaaaatctaggcaataccattcaggacataggcatggacaaggacttcatgtctaaaacaccaaaagcaatggcaacaaaagccaaaattgacaaatgcgatctaattaaaytaaagagsttmtgcacagcmaaagaaactaccatcagagtaaacaggcagcctacagaatgggagaaaatttttgcaatctattcatctgtcaaagggctaatatccagaatmtaacagtgaactcaaacaaatttacaagaaaaaaacaaacaaccccatcaaaaagtgggtgaaggatatgaacagacacttctcaaaagaagacatttatgcaacca

SEQ ID NO: 652 - DNA, 401 bp, Homo sapiens
gacataggcatggacaaggacttcatgtctaaaacaccaaaagcaatggcaacaaaagccaaaattgacaaatgcgatctaattaaaytaaagagsttmtgcacagcmaaagaaactaccatcagagtaaacaggcagcctacagaatgggagaaaatttttgcaatctattcatctgtcaaagggctaatatccagaatmtaacagtgaactcaaacaaatttacaagaaaaaaacaaacaaccccatcaaaaagtgggtgaaggatatgaacagacacttctcaaaagaagacatttatgcaaccaaaagacacatgaaaaaatgctcatcatcactggccatcagagaaatgcaaatcaaaaccacaatgagataccatctcacaccagttagaatgg

SEQ ID NO: 653 - DNA, 401 bp, Homo sapiens
cccatttcattctgaaggtcaaggacaacttaggtaaagggcagtgactaagaaagaccaccctggtcaggctcgatggctcacccctgtaatccaagcactttgggaggctgaggcaggcagatcacttgaggttagcagttagagaccagcctgaccaatatggtgaaaccctgtctctactaaaaatacaaaaattarctgggtgtggtggtgcaagcctgtaatcccagctgctctggaggctgaggcaggagaatcacttgaaccctggaggtggaggttgcagtgagccaagattgcatcattgcactgcagcctaggtgatagagtgagactctgtctcaaaaaaatagaaagatcattctggcttttgggtggagaatagactgtccatgggc

SEQ ID NO: 654 - DNA, 401 bp, Homo sapiens
aaagccagggttgttaagtagtatgtctcaatcaacatactcaaagtctgtgaaccaaaggcatagtcttaggcttcctcttatagtctagcatgatattattctatttcatctttttttatatgtttgctcccttgagtgttttagaatgagactgctagattttatgtttctaaagctggttttctaccaggcctgttytcagaacattctttttttttttttttttttttttttttttttttwaagatagagtcttactctgtcacccargctggagtgcagtggcgcgatcttggctcactgcaaccttcgcctcccgggttcaaacgattctcctgcctcagcctcctgagtagctggaattacaggcgcccaccactaaccccatctaatttttg

SEQ ID NO: 655 - DNA, 401 bp, Homo sapiens
gtctgtgaaccaaaggcatagtcttaggcttcctcttatagtctagcatgatattattctatttcatctttttttatatgtttgctcccttgagtgttttagaatgagactgctagattttatgtttctaaagctggttttctaccaggcctgttytcagaacattctttttttttttttttttttttttttttttttttwaagatagagtcttactctgtcacccargctggagtgcagtggcgcgatcttggctcactgcaaccttcgcctcccgggttcaaacgattctcctgcctcagcctcctgagtagctggaattacaggcgcccaccactaaccccatctaatttttgtattttttagtacaaaatgggatttcgccataatggccaggctgg

SEQ ID NO: 656 - DNA, 401 bp, Homo sapiens
gcttcctcttatagtctagcatgatattattctatttcatctttttttatatgtttgctcccttgagtgttttagaatgagactgctagattttatgtttctaaagctggttttctaccaggcctgttytcagaacattctttttttttttttttttttttttttttttttttwaagatagagtcttactctgtcacccargctggagtgcagtggcgcgatcttggctcactgcaaccttcgcctcccgggttcaaacgattctcctgcctcagcctcctgagtagctggaattacaggcgcccaccactaaccccatctaatttttgtattttttagtacaaaatgggatttcgccataatggccaggctggtctcaaacacctgacctcaggtgatct

SEQ ID NO: 657 - DNA, 401 bp, Homo sapiens
tatgcatccctcaatcccctccctcttctgcatattttgaacttgcaaagccttctgatattttaagcagaaggttgcaaatgcttgtcctactgcctggccaagtcttaggtaaaaattgtcacctaaccacatcctcagatcatttcccctgtactctagatcactaagcgcatgtgcacacacacgcatgcacgcgcrcacacacacacacacaccatccaggatcctcctgaggatgaatgaatattcctgggccaaatattgcatgaggatttgggcaatgttttggctagttgaacaacaacaatgctcatatttatgccaattggcaggaccattgcttgatcatcctgtacttggtgaagggcattttttattgtttccttttttgtttgttt

SEQ ID NO: 658 - DNA, 401 bp, Homo sapiens
taaattagttaatgacagggctctcttattcttaaacctgtcatttcccctaaactatgttgttttcctaaagtgagattaaaagtttgaaaacaaaggaacaaaatgttcatttatttactacgtttctgaaaacttgcatatatcttaatatatatatatatcttatttatatgtcttatttcattgttatgaaaacckagctttctttccttctatcctttcaatattatgctacttgtatttagtatttacattgtatgattcaaaatattgttcactgcagagccaagtagtagactatgaccgctctgcttattttgaacaatcttttatttttttctggagttgataattgcttcagatttttgtctggctttttataagcctgttgataattt

SEQ ID NO: 659 - DNA, 401 bp, Homo sapiens
taaaattctctcattgttttaaactttttttttgagtggagtttcactctttttgcccatgctggagtgcaatgacacgatcttagttcactgcaacctccgcctcctgggttcatgtgattctactgcctcagcctcctgagtagctgggattacaggtgcgcaccatcatgcccaactaattttgtattttttgtagakacaggatttcaccatgttggccaggctggtctcaaactcctgacctcagatgatctgcccgtctcagcctcccaaagggctgggattacaggcattagccactgcacccggcctgttttaaacatttaatggactcaccagggaattttcttgtcttattactttgataatttcctccactccattttccctctaatatt

SEQ ID NO: 660 - DNA, 401 bp, Homo sapiens
tttttttttttttaggactagatggaggtaagggaaagtgtgagacaataaaactggcaaccagaaacagaagaagaaaggaagagagaaaggaatctacggagtgtggaagttttaggagtaaatttctatataagttgcaaaattttagtaattctttagttcttatttcatttattcacttattttttttttcttttkagacagagcctcactttgtctggagtgcagtggtgcaatcttggctcatgcaacctctgtctcccagcttcaagcagttctcctgcctcagcctccccagtagctgggactacaggcaccagctaactttttttatttttagtagagatgggatttcaccgggttggccaggctggtctcgaactcctgacctcaagtga

SEQ ID NO: 661 - DNA, 401 bp, Homo sapiens
ctattagggaaaatacacgaaaacaaatataaaacaataacaaattaagtaactaattaaataatgtgtggcatggaaataaatgaaatactgtgcaaccttcgaacaccattttatagaacaaataatcattggagaagtagacgtgatatgttgttaagtaaacatatcatataaatggcttagaggcttagagatgtrtaggaaaggaaatactctaaaatgttaacaagaatggtatctctggtgcaattaaaagtctttttaatttggatgggtttttttatattttacaaatatttctgcattgattctacattacttatgtaatcaaaggtgcccaatacgtgttacttaaagaatctcttcaataattagaacgtaggcactcaatgctcatt

SEQ ID NO: 662 - DNA, 401 bp, Homo sapiens
tagcagagagctcatgatcgtccatctaactcccacaccatcttggagagccacagggtatcctacattatcctgctgaagatccttcagtacctaatggctctcgtgaagcattccaaagtgaaagtcatggagcctatgccactaaatcagatataactagatacatgttggattaaaaggaaaggaggaaaggcatakaagggaaaaacagagattattggagaccaaatacctctataaattctcaaaatttgtttaaaggctttactttttcaagatgcatattttggcaatagcttacgaagactgaagttttcttatttaatcttagagatactaatacttagaaaagaaaagtcttctatcttgttgaccttctctgtagccatttgaaatct

SEQ ID NO: 663 - DNA, 401 bp, Homo sapiens
gtattatattggtgcaaaagtaatgcagtttctgccatttctcttaatgccattactcgtaagggcagaaatgaccattacttttgcatcaacctaatacctccagattttagatatttgagtgccattgcttgatatatcttttgttttttcttctggaaattttggttactttagttgcataaaggatgacttccattwtaccctgttaagcatctctgtctggtcagaagctactactctgttctttctagttcagtagggaacaatcagtttccttctcaattttcagctaatctttatgaatgaaatttgattaaatctagcaaaactatgcaaacatcataacagcatatggggagccttcctgtagtaccagtgggctatttccgtctaataac

SEQ ID NO: 664 - DNA, 401 bp, Homo sapiens
cttcctgtagtaccagtgggctatttccgtctaataacagattcaaaaaatccaattagacagtttgaaaaaagaaagccagagttaaaaatatctgactgtttgactgagaacagcagggaatggtttataggccaatcatttatggtgaataggatcttagtggtgagcaactcacatctctagcccattagaataatktgttactcatattgctcctaaagctttctacttaattataccaagttaaatagcagacattctcactcccttttgatggaaaatcacatttattcacccacacaataccatccttgggtgttaagggatgagagttgacctaatgggaagacaaacaaatggtttaggaaatgagacatgatttttttacacaaaggtta

SEQ ID NO: 665 - DNA, 401 bp, Homo sapiens
gccaggctggtcttaaactcctaacctcaggtgatccgcccacgtcggcctcccaaagtgctgggattacaggcgtgaaccaccgggcccagccaagtgttttaatttttaaaaactatttgaccatatgaaaatatagatgttccattaaatatatatagcctaagaaatataatcagcaatgcagtaaaagattatgtrtacggatgctcctgacagttggatttacaatagggaaaagctggaaacaacctaaatatttgaaaaaagagaatggtaaatacatcaaaaatacaataaatacagtgttaagtgaaaagtttgtgcaattttgacttgagaaatttttaatgtactatgactacttggaagaatatggatgtacctcaaaataagtaatg

SEQ ID NO: 666 - DNA, 401 bp, Homo sapiens
taaaatgggttatacctatcatttttttcatattagaaattaaaactgagaaatgtttgaacacaggaatacccaagtacatattccagtgatcagcagagcaatggcatcatcacatcatattgcctccagaaaatcccactgacaatttgttgaagactaaaagggaaaaagccaaacaccttagtatgctgtaaaaayagctttcatctcacagacctcccgaaagggtcttgaagatccatgagcaatccctggaccacactttgagaaccgcttttgtaacgtgtgaccttcccttatcctctgccatgcraaactatctcagaatctaagattgtctacagccacggtacaaccagctctgagactttgaagagaagaaaagatgaacttcatca

SEQ ID NO: 667 - DNA, 401 bp, Homo sapiens
catcatattgcctccagaaaatcccactgacaatttgttgaagactaaaagggaaaaagccaaacaccttagtatgctgtaaaaayagctttcatctcacagacctcccgaaagggtcttgaagatccatgagcaatccctggaccacactttgagaaccgcttttgtaacgtgtgaccttcccttatcctctgccatgcraaactatctcagaatctaagattgtctacagccacggtacaaccagctctgagactttgaagagaagaaaagatgaacttcatcactaaaaaagccaaagtagttgaaagcaaacactagcygaattttcttcctccaagcctacagaccacctcacgtagtagctgtagtgggagctgctcccaagatttgataagaat

SEQ ID NO: 668 - DNA, 401 bp, Homo sapiens
agatccatgagcaatccctggaccacactttgagaaccgcttttgtaacgtgtgaccttcccttatcctctgccatgcraaactatctcagaatctaagattgtctacagccacggtacaaccagctctgagactttgaagagaagaaaagatgaacttcatcactaaaaaagccaaagtagttgaaagcaaacactagcygaattttcttcctccaagcctacagaccacctcacgtagtagctgtagtgggagctgctcccaagatttgataagaattagtaaagaggtttataagaccgtgtgtgcagagtctcacagttgctgatacttgttgggcttagctttatctctgtctacagtagcagcccaggacaaaacattcatatgatattctctct

SEQ ID NO: 669 - DNA, 401 bp, Homo sapiens
catttctcagagataactgtgttagcattttggtgtgtttcttatagccctttttgttgtcaaaaataagcaaagataaaggggaaagattttgttctgtttcttttttctatatacacagtatatcttggagatagtttcaagtgccaaatacatgcatttatttttttcacagaatgcaagtcatgtcatagcatggaygaagttgggtttatttaatcattcactagttggcaggtatttaggttgtttacagtttttccattttagaaacagtgttcccatgtaaagaatgtcccttgtgcataaatcgttgtgacatgtgttggaatctcaaaagtggaattgctgagccaggggcatcctcattttaaaatttaatagacatcatcattatcctc

SEQ ID NO: 670 - DNA, 401 bp, Homo sapiens
ttgccacctttaacacagggatattaggtaacttaagaggtaaatgtgtgtttcttgaatcccagatctaccacttaaaaattatgtaaggtttgatttactgattcatttttcctgccccaccaacttcatgaccataaaataggggcaggggagaaggaaatgataagacttagcatattataccatatggaaattaartaatacacataaaatacttaaaatagygtcaggcaatttaagagcactcagtaaagttagctcttattaaatttttgcaactccatgtatacctgggatctgtttctggtttgttcatggcagcattgtcaactaaaactttctgtgctattcagtgtgatagttattggacacaatgaccactgaaaacatggctagaa

SEQ ID NO: 671 - DNA, 401 bp, Homo sapiens
gtaacttaagaggtaaatgtgtgtttcttgaatcccagatctaccacttaaaaattatgtaaggtttgatttactgattcatttttcctgccccaccaacttcatgaccataaaataggggcaggggagaaggaaatgataagacttagcatattataccatatggaaattaartaatacacataaaatacttaaaatagygtcaggcaatttaagagcactcagtaaagttagctcttattaaatttttgcaactccatgtatacctgggatctgtttctggtttgttcatggcagcattgtcaactaaaactttctgtgctattcagtgtgatagttattggacacaatgaccactgaaaacatggctagaatgatgggaaaattaaaattttaattaa

SEQ ID NO: 672 - DNA, 401 bp, Homo sapiens
tattaaatttttgcaactccatgtatacctgggatctgtttctggtttgttcatggcagcattgtcaactaaaactttctgtgctattcagtgtgatagttattggacacaatgaccactgaaaacatggctagaatgatgggaaaattaaaattttaattaattttaatttaaagataaacagccacatgtggtcagtargtaccatattggacaggagaatgcccatatagtattttccatgagctttcatgagttatgctttattatataaaccagattttatttaagaactcatatggactagattatgaattttatgagatgattttccttgagtcatcaagaagaacacagtttttttctttaatctgttaaagttgggaagtattaatataaat

SEQ ID NO: 673 - DNA, 401 bp, Homo sapiens
tagttcctacttgaaatcaacattccagcaataaaccttattggttcttgttattctttgacctcacggttaaatttgatttgctaattttggttagagctcttctatattcatatttgagattattttaaatttgcattgtgcattgactgtgagatgagtattttgttggcttggtaaaatgaattaggagacttcatrttctaaattctgaaatagtttgaatattggagttattatctgttcttgggagatggtttttatcaccagttcccctaaactcctttttaccttgaggtaaagcaaagtctaccttactatttcttgtatggtgattggctattcaggttttctatctattattaagacaattttgaactcactggtgctccaaagaaaat

SEQ ID NO: 674 - DNA, 401 bp, Homo sapiens
aggttcagcaacttgcccaaggtctcacagttgtaagggacagagtctgaatctattgcctctatacttaatcaataaagattcattatatgcattagctcatcaaaggttctaagatgtctagagtaaggaaaatttttgactttgtttaaataaccatttcctggaagcaccatcgaaaacattggtagttgcagggtrcagtggctcacacctgtaatcccagcaatttgggagaccaaggcaagaggataacttgagcccaggagttcaagccccatctggccaacatggtgaaaacccgtttctactaaaaatacaaaaactagccaggctggtggtgtgtgcctgtagtcccagctacttgggagtttgaggcaggagaattgcttgaacctggg

SEQ ID NO: 675 - DNA, 401 bp, Homo sapiens
gaaaacccgtttctactaaaaatacaaaaactagccaggctggtggtgtgtgcctgtagtcccagctacttgggagtttgaggcaggagaattgcttgaacctgggaagcagaggttgcagtgagccgatatcatgccactgcactccagcctgggagacagagcaagactctgtctcaaaaaaaaaagaaaaataaaggkrgggtgttttatatttatatctacataaatctatacattatctagatattatactatattatggaaatgtatatattatattagaattaatatttctaattatcgtatacagttatacattttattgtgttattataacatattatatataatwggttctgtttttctgaagagccataaataatgcattcaatttagaa

SEQ ID NO: 676 - DNA, 401 bp, Homo sapiens
aaaacccgtttctactaaaaatacaaaaactagccaggctggtggtgtgtgcctgtagtcccagctacttgggagtttgaggcaggagaattgcttgaacctgggaagcagaggttgcagtgagccgatatcatgccactgcactccagcctgggagacagagcaagactctgtctcaaaaaaaaaagaaaaataaaggkrgggtgttttatatttatatctacataaatctatacattatctagatattatactatattatggaaatgtatatattatattagaattaatatttctaattatcgtatacagttatacattttattgtgttattataacatattatatataatwggttctgtttttctgaagagccataaataatgcattcaatttagaag

SEQ ID NO: 677 - DNA, 401 bp, Homo sapiens
ggagacagagcaagactctgtctcaaaaaaaaaagaaaaataaaggkrgggtgttttatatttatatctacataaatctatacattatctagatattatactatattatggaaatgtatatattatattagaattaatatttctaattatcgtatacagttatacattttattgtgttattataacatattatatataatwggttctgtttttctgaagagccataaataatgcattcaatttagaagacaaactcttttagttggaatgagcctaataaaaataattaccatcccaagccaactttaggttattatttgtctctgacagtattaaattatcattatattaaattcctagaagcactatagaaatggcagcagagtatttatattatatat

SEQ ID NO: 678 - DNA, 401 bp, Homo sapiens
agagtatttatattatatataatataggttatattattagatattaatatattacattacaattgtattatcatgatattatatataaattggttctgtttctcttgacaaccttactaatacatccagtttagaacataaattctattagttggaatgagcctataaaaataattaccattccaaaccaactttaggttrtcatttgtctttgatattattaaattattattattttaagttcctaggagcacaatagaaatgctggcagagtgtttatattaaatataatataaattatatttttagatgtaaatatattactttatgatgacattattgtgatatatatataatataatgagttctttttccctggagaaccttaactaatacatcta

SEQ ID NO: 679 - DNA, 401 bp, Homo sapiens
agaaaagggagaggtaaaagctcccaggaaagtctagtgcccagccaaaggccatgggagtgatgagtgaccctgcccacacctaacggagcgtcccctgctctgctagtcagtcaacagaacaccagccaatttctctaagccaagagctggttatttccaacctcccctggaagagtttacttaataccataagaagtmattttctcttccatctactgcaagaaaaaactggatattgcaattgccatcctttttgagttaaaatactctacatttttaaacaaataaataaaaaagcttaaccattttgaaattaccagtagggaagaaatcgggtgaaaaaggagaggaaccatgcattactgagaatactcctgtcccaaatctctctccatatc

SEQ ID NO: 680 - DNA, 401 bp, Homo sapiens
tgtataccttaccacctatttgaaaaatgatggatagttatcttaaacggtgaagaattagtgtaagttcttaaacaaaatagtggcgatattaagatcatgcttgagaaacctaattcttgctgtctccttacatattttaagtttggcctaactctgtctctgtgcatagtgagctgtaatgtaactggatgtgtaaayagattgtagcctactcttgtgccaatctccaagttttggccaatcaaaggtggccaaccattcaaaccatgttcaagtaaggcaaacatcaagctgtaaccaacccaactatttttgtaccttgcttccattttccatatgtcacttttctttttctgttcataaattctctcctaccacgtggcatcacgggggtgctc

SEQ ID NO: 681 - DNA, 401 bp, Homo sapiens
ttgtaccttgcttccattttccatatgtcacttttctttttctgttcataaattctctcctaccacgtggcatcacgggggtgctctgaacctcttctggttctggggctgatccattcatgactcattctttgctcaattaaagtctgataatttaatttgtctaaagttttccttttaacacgaccaagagtcacagaytgcttagtctggagaagctactcttggctctatgcagtccacaaaaaatgacatttagaaatggttttccttccctggtctccagagaagcagcggctttcatactctgaaatgcagcatcctcatctgtaagatgcaggtgctaaatgatgactgttgttctttcaaatgttaactttctatgagtcacttcttcattg

SEQ ID NO: 682 - DNA, 401 bp, Homo sapiens
tttcatactctgaaatgcagcatcctcatctgtaagatgcaggtgctaaatgatgactgttgttctttcaaatgttaactttctatgagtcacttcttcattgtatgtgtcaagaagcacaacctcgaaagcctgcctttgacaatgcttagaggttagaggatgccaaatgagcctcatcttctttggctactgagttartaaccatccttcatttatctcagggagcaaaggcaggatttccgtgggtgtccaaggtccttactcacagtcaggatgcatggcagtacccttaataactacagattcagaatcacagaagacatttaccgartatgtattttctgccaaaccctgtgccaggtgttattagaacattacttatgaaatatttggtagtg

SEQ ID NO: 683 - DNA, 401 bp, Homo sapiens
tgcctttgacaatgcttagaggttagaggatgccaaatgagcctcatcttctttggctactgagttartaaccatccttcatttatctcagggagcaaaggcaggatttccgtgggtgtccaaggtccttactcacagtcaggatgcatggcagtacccttaataactacagattcagaatcacagaagacatttaccgartatgtattttctgccaaaccctgtgccaggtgttattagaacattacttatgaaatatttggtagtgtggatgaagaggcagcttttcctgcttacacaatacagaaatatgatttcaaaaatctattaaaattttattaatctcagaaggcatgatttctaattgtgtttgatcttacacttgttatgatttaggaatt

SEQ ID NO: 684 - DNA, 401 bp, Homo sapiens
aacattacttatgaaatatttggtagtgtggatgaagaggcagcttttcctgcttacacaatacagaaatatgatttcaaaaatctattaaaattttattaatctcagaaggcatgatttctaattgtgtttgatcttacacttgttatgatttaggaattcacatctgagttggttgcatgatgctatagttggcaacaygattctgaccgccaccatcacaaatagaggttagaaaatattacttatgtgaaaataaatgccatttctggcacctaaaacagctcttttctcaccttcctatgatgaggttttattgagcttttgcaggaaagaaaagaaagaaatctgcattcaggtttcaggagtaaagaggctgctcattaacaaagccgtttcaa

SEQ ID NO: 685 - DNA, 401 bp, Homo sapiens
accacgaatacatgccctattactaaaatcactgtcatttctatgcttttcttctcccttcaatcacataccacccagttttcagttcctataattgccaaaagccatttatgaatctgccttattgtatgggttacaaacgtctattttcctgctctgttcatacacatttgggagcaccttaagatgctgaaacactgrcaaatgcttaatatatttcatttgaaagaattatgatctaaatcttaaagaaacagtgagtaaagtgcagtttctgctgcttggttactgtagttcattcggggaatttcatcttggtcgtgttgaatgcagtggttagatcctgtgaagttgtttaattaaaggtgttctagtagtcaaagccatgtctaaaaccccgt

SEQ ID NO: 686 - DNA, 401 bp, Homo sapiens
gaatatttcttatctatatgcatatatatatatatttcattataattgttgcttctgcagaaaattgggatagaaatctcagatgagctgtagttacacggagatctacagcaatgcaatgtttagctagcatgcattttgtcatccaaggctagtaggtgaaatatttcctttacctgtcttgatgcacggtggagaaakgagacccgcttcgttttccctctaatctagagagttaacctcctccaggtagggttgaaaatatgaacagagctgcttttgcaagactgtgttgcctctaaatgtgatttaactcgcatattcagaatcttagcaaaaataaataaataaatagtaagatggggtaaggcaaatacatagatattttggagatcttatcc

SEQ ID NO: 687 - DNA, 401 bp, Homo sapiens
caggtagggttgaaaatatgaacagagctgcttttgcaagactgtgttgcctctaaatgtgatttaactcgcatattcagaatcttagcaaaaataaataaataaatagtaagatggggtaaggcaaatacatagatattttggagatcttatcccttattcaaggactgtagattattacagctttgttgtcatattatytctaggcagtaaatcatagtaaagtagtaaattcatagggaatgaattaatctcctttttgttttgttttctctgaaaaagagggtgtgattacagcatatattgattgggtactgattatgggacattttcattgtatttgttgttgttgcagtagactaaatgtcgagcccgtgaatctcttgtgttggcattgtcag

SEQ ID NO: 688 - DNA, 401 bp, Homo sapiens
tatatctttatattttttttgctctcttctcaaccatgtttagtgttttgtttatattcaaaggattttattttcacacttacaattctttacttgtctgtcattcaaatctttgttaccaaaacagtttgctctttttcatcattcactaagcattcctttcacagctaagctaaagtgtctatatggaaacatacatayacacacacacacacacacacacacacacatgcacacacactttttccaggccacagacaggaagatatgtgtaaatgtatacatgttttcagtagcatatatacacaagggtctccaataagatttttctagaaacaaaggctgatactacttcatttcatattattgtaaagtgctaattctaagtaaaagtagactaa

SEQ ID NO: 689 - DNA, 401 bp, Homo sapiens
ttttctctgccatctcccccagttacacccagggcaagtctatcttcttcaaagacattcagtcagcccacagctttttatcttttcaaacctttaatggcaccattagctacggaaccttgatttccttaatttttcccccactgtcactgcaaccatcacatgtggctctcagagcttctagttccctggaaacaggakttctatctgccatcaccaggtataaggtgccaccacttgaagggatctgccctatcaaaaatgaggaaatatattgatcaaaatggctggagaaagtgaccagccaaaacacagcttcacagtcttgcctgttttaagtagattctatttccattttgccggtgacagcactaagcaaataagcaatgttgccaatccga

SEQ ID NO: 690 - DNA, 401 bp, Homo sapiens
aaaacatcttccgtaataagcagctagaaagtaccacaatgtaaattcaactgcagaagacatgacaccacagggaaatttcgtttcactgcagcagtgtctaaaaactgaagatggggaaagtgtagagtgtgttattaaaatgattttttcaaaaggttttaagagtctaaataaattgcataattagtcagtttcctwcctcctagtcttcctacctttagtctttatttttagctctcctgagtttgtagttgttctccttccatggtttgattctctccttagctttcagattctatacatttcacttctctttataaataatttttaaaaattcttcatgtgaacctgttcaagaacctgttgcattgaggactgaagatatggctctagattcc

SEQ ID NO: 691 - DNA, 401 bp, Homo sapiens
cactttctgcatattgccaagggctcgctacgtatgtgtgttctggttggcagacattttgggtaactactattctcaatttgtacctactttatttcaatacatgtttcaagatgagtgttaaagggtacattgctttaggaaacttgtctttttctggcatttgaacttgcctaaattagaaaaaaaaattctggttcyagtcctttttttctaaaaaaatattccaaatcattagatgaaactgttaaagataacgtttggaaagtttgtctcctcttyggtgattaaaaagtgctttccatttttggcccatggctcttttcctggggcatagcatttgattataaagcttttctgatgaaagtatcacaggayagcaaacatgagaatgggagaaa

SEQ ID NO: 692 - DNA, 401 bp, Homo sapiens
tgtacctactttatttcaatacatgtttcaagatgagtgttaaagggtacattgctttaggaaacttgtctttttctggcatttgaacttgcctaaattagaaaaaaaaattctggttcyagtcctttttttctaaaaaaatattccaaatcattagatgaaactgttaaagataacgtttggaaagtttgtctcctcttyggtgattaaaaagtgctttccatttttggcccatggctcttttcctggggcatagcatttgattataaagcttttctgatgaaagtatcacaggayagcaaacatgagaatgggagaaataattttgcatgcaattttttgtcatctggctgcactgtatgggaaatacattttccctgtcaaaatgtcaagttgttttg

SEQ ID NO: 693 - DNA, 401 bp, Homo sapiens
attagaaaaaaaaattctggttcyagtcctttttttctaaaaaaatattccaaatcattagatgaaactgttaaagataacgtttggaaagtttgtctcctcttyggtgattaaaaagtgctttccatttttggcccatggctcttttcctggggcatagcatttgattataaagcttttctgatgaaagtatcacaggayagcaaacatgagaatgggagaaataattttgcatgcaattttttgtcatctggctgcactgtatgggaaatacattttccctgtcaaaatgtcaagttgttttgacttcacaacaaaagaggaaggaagttcttaaatgtagaacaataactcagctcactgctgatttctatttgttctatccttacatcacagtatag

SEQ ID NO: 694 - DNA, 401 bp, Homo sapiens
gcataattttgtttattgtttgagaaagtagtattttgggtaaaaattctgaaacaggcagtgagtatgtctgagtatttctggcaagggctatttcttcctttctccttttactctggagttttcttgaactgagctgtttggacaaatgacacatatttcaagaattccaactgtgggagtgtttcactcacaggattktgctttcttctaagagccaggtctggtgaacactctcaggagctttgtaacatgttccaagctatgcagaagtgcttagttcattcactagtcaaagactaacacatttacagcaataaaatgcattataagcattctttcttcatgaatctattcatcccattaaaaaagcaggaattccaattaagtgaggtaaaata

SEQ ID NO: 695 - DNA, 401 bp, Homo sapiens
ttccaattaagtgaggtaaaatatgctaagtagtacagtataagatttttaaaaattacaccatgtttttcatggattattttaagaaaaaaactattttaagaaaaaactgtcctatttttggaaggtctagtcccaaactgcacaggaaagttagaggtaaactgttaaagtctttgagaactggcatttttcaagccrcagtgaatgaaatcaagcattyctctgtttctcctttcctttcggaatttcttttcctgaggcttgagaaggcaatactggtcttacttttcacatgagtyaagtttatactagctgagcaccctgaatcattaacgtctttctccccaggggagaccaagctcaaatccatcatcagaatacatacttagaccctctcc

SEQ ID NO: 696 - DNA, 401 bp, Homo sapiens
atgctaagtagtacagtataagatttttaaaaattacaccatgtttttcatggattattttaagaaaaaaactattttaagaaaaaactgtcctatttttggaaggtctagtcccaaactgcacaggaaagttagaggtaaactgttaaagtctttgagaactggcatttttcaagccrcagtgaatgaaatcaagcattyctctgtttctcctttcctttcggaatttcttttcctgaggcttgagaaggcaatactggtcttacttttcacatgagtyaagtttatactagctgagcaccctgaatcattaacgtctttctccccaggggagaccaagctcaaatccatcatcagaatacatacttagaccctctcccttctttctggccccctgcttc

SEQ ID NO: 697 - DNA, 401 bp, Homo sapiens
agaaaaaactgtcctatttttggaaggtctagtcccaaactgcacaggaaagttagaggtaaactgttaaagtctttgagaactggcatttttcaagccrcagtgaatgaaatcaagcattyctctgtttctcctttcctttcggaatttcttttcctgaggcttgagaaggcaatactggtcttacttttcacatgagtyaagtttatactagctgagcaccctgaatcattaacgtctttctccccaggggagaccaagctcaaatccatcatcagaatacatacttagaccctctcccttctttctggccccctgcttcttaggaatgtgctctaaccaccacagcattcctgatcaccacctccagatgacaaaaagaaaaaatgagtggcagtgaa

SEQ ID NO: 698 - DNA, 401 bp, Homo sapiens
ctaaccaccacagcattcctgatcaccacctccagatgacaaaaagaaaaaatgagtggcagtgaaccagaagagcttaggccatctattttatcctaaaatctgttcagaaatacgaggtttgtatcaattagtaagcacactgggaatacaggtatacaagttgttagcaatatttggttatataatgtctatagatayttattttgctttctctcagatattaagaattatgtctttcctttaacctccatcatttgtttttctactttggtggaagctttttgtttgtwtctttactgcaacagtgaatttatccttggatttctccattatgattggcagtatttatacaataatttcttggtattagttaattgataccttatatttactatttt

SEQ ID NO: 699 - DNA, 401 bp, Homo sapiens
atcctaaaatctgttcagaaatacgaggtttgtatcaattagtaagcacactgggaatacaggtatacaagttgttagcaatatttggttatataatgtctatagatayttattttgctttctctcagatattaagaattatgtctttcctttaacctccatcatttgtttttctactttggtggaagctttttgtttgtwtctttactgcaacagtgaatttatccttggatttctccattatgattggcagtatttatacaataatttcttggtattagttaattgataccttatatttactattttcccccaaagctgagtaaagaatagaatgaaatggcctatacttatcagtgtaaatggatattagaattgctgctcttattccaaaaaatakc

SEQ ID NO: 700 - DNA, 401 bp, Homo sapiens
twtctttactgcaacagtgaatttatccttggatttctccattatgattggcagtatttatacaataatttcttggtattagttaattgataccttatatttactattttcccccaaagctgagtaaagaatagaatgaaatggcctatacttatcagtgtaaatggatattagaattgctgctcttattccaaaaaatakcactyaaagttcacaaatgaaagttaataactgaattttagtaacaacaacttcaacttaaaaaattccatgtaattaatagctcatgagtcccactgagataggttgaacttcataacttctaaagccttttatgtttctactacttttcagttctaatgttcaatagtagcgtgagtatctggttagtttcagtataa

SEQ ID NO: 701 - DNA, 401 bp, Homo sapiens
ttactgcaacagtgaatttatccttggatttctccattatgattggcagtatttatacaataatttcttggtattagttaattgataccttatatttactattttcccccaaagctgagtaaagaatagaatgaaatggcctatacttatcagtgtaaatggatattagaattgctgctcttattccaaaaaatakcactyaaagttcacaaatgaaagttaataactgaattttagtaacaacaacttcaacttaaaaaattccatgtaattaatagctcatgagtcccactgagataggttgaacttcataacttctaaagccttttatgtttctactacttttcagttctaatgttcaatagtagcgtgagtatctggttagtttcagtataaaaaag

SEQ ID NO: 702 - DNA, 401 bp, Homo sapiens
ggtggatggcactgctcattagaaatagctgtcctgccccagaacaatcttcaagacaaaggttgcaagactatctttgaccttcctgtccctaaacactccccaaccccaagccaaacacgcgcctaaaagttttcacaccttgccctttactaacagcaatcatatttaggaggaatatattattgttagtcaggaaaytctacctggcttcaggaggtagcttagtgggtatttgctaagtctgatacctttcctttcaacatttagctgagattacctatactaagagcacgaactacaactgtggaaaacagaagaaaggagaatgttctccaaatcaaagtgtgctaaggtcagcttggggcagccaacaattcctggaaggtgacagagataaa

SEQ ID NO: 703 - DNA, 401 bp, Homo sapiens
tggaagaaaaaacaagagtataaatgaagtgtcaaagatgttaagaaacaggatcttttaaaaaattatttttaattattatgggtacataataagtgtatatatacatggggtacatgtgaaattttgatacatacaatgtataataatcttatcggggcaattggggtgtccatcacctcaggcatttatcatgtcttrtattagaaacagtccaattctcctcttttagctatttgaaaatatacaataaattattgttgagtatcatcactctgttgtgctatcaaatactagatcttattctttctatctaactatgcttttgcacccattaaccatccccaccttctccccatgctggctatccttcctagcctctggaaaccatcattctatta

SEQ ID NO: 704 - DNA, 401 bp, Homo sapiens
agaacattattaacttgaaagaaatgcatgtattttgttaattgatagaaacaagatcaaagggcatattatattattattccgctttgtaaggaaaaataggttttgcatatttatataaaaagggaaattgaatgtgatatactctggggtattaataataattgtgaattaaattcctttctttagtttatattgctrtctcaaatcttctgatttttctaccttgaatgtaaattttttgtttgtaatatggcactttaaattaaagttgtttttcagctgggcacagtggctcacacctgtaatcctagcactttgggagaccaaggtgggtggattacctgaggtcaggagttcaagaccagcctgaccaatatggtaaactccttctctactaa

SEQ ID NO: 705 - DNA, 401 bp, Homo sapiens
  misc_feature (1)...(401): n = A,T,C or G
ggagtgcagtggcatgatcacagctcactgcagcctcaacctcctgngctcaagtaatcctcccacctcagctttccaagtaactaggactacagatgcacaccaccatgcctggttaatttttgtaatttttgtagagatgaggttttgccatgttgcccaagttggtctcaaactcctgacctcaagtgatcctcccayctcagcctcccaaagtgctgggattacaggtgtgagccactgcactaggccttaaaatttatttttcaaaaacttgatgattcaaatcattgaagatgctcttatgccaaagaaaaggtagttctaggaagttcatggaatcttacaaacacctttacagctcaacagaattgcaaagatgggtagtgttttgttttgtt

SEQ ID NO: 706 - DNA, 401 bp, Homo sapiens
actcatatcaggtgaattagcaaacattctcatttcagacgatttttgctgtccctggtcatgaaatttccttaactgggttctatcttttactttttatcccaggcttttagcaagggtcataggaaaatggccatttccacatatctggtatatcccatttgaagatattgcctaacaaacattactcaggatcccttrcataaaaacctccatgataaatttcttctgtacttttttccccaaaaagctggattctcctgtaaaactgttatctattctctttatatattataattatggaattcattatcatttctactcttatctacatgactaggtcaccaacagctaattatatagctaattcatggtagttaattttatttacttctcttaag

SEQ ID NO: 707 - DNA, 401 bp, Homo sapiens
acagctaattatatagctaattcatggtagttaattttatttacttctcttaagtcatgacttacaaaattgcatttctatgtatgccatcttattacctccatttatttaagttgcatactacttcacatttcctttgaagtgtatattattattagtagtagtagtattttggagacagggtctcactctgttgcccakgctggagtgcagtggtgcaattatggctcactgcagcctcaaccttccaggctcaagctgttcacctacttcagcctccccagtagctgggactacaggtgtgtgccaccatgcttggctaattttttaaaaatttcctatttcttgtagagatagagtcttactatattgcctaggctggtcttgaactcctggacaca

SEQ ID NO: 708 - DNA, 401 bp, Homo sapiens
gattctcctgcctcagcctcctgagtagctgggactacaggcatgagccaacatgcccagctaattttcatatttttagtagagatagggtttcaccatgttggccaggttggcctcgatctcttgatctcgtgatccacccccccatcagcctcccaaagtgctgggattacaggtgtgagccattgcatccagcctcaraagaatagtataaaccttatgtgttcatataagcagtagaacctatccctaatagttggattttattgtgtaagtgtttcattaaggaatgtctgaaacatgtccagatttttatttcagtggcttagttttgccacagaacttcagttttataaatgtgtgtactggcttaactgtgaaagtattaaaattattgtatt

SEQ ID NO: 709 - DNA, 401 bp, Homo sapiens
tgttcccagagtcattactgaccaactgtgtgctttgatattatatttgctttctgatactaattatattaattctcgctcatagaaatcttccctccttcataccccacctctgtttgattcttaatctcatacataagaggtttttattcaatgtctcatttttctttccaggacaagtatgttgtaagaattaattartagtcttagaaccattcaagcagtaggttctaattgagtatttttctccccggttagcacagcaccctgtcagagccctcaaagtcagacaaagaaggatgaaacatgttttggtccttaataaagaactgctgattgactgtttgaaaaacaaatgccgcacacctgtaatcccagtgctttgggaggccaaggcagga

SEQ ID NO: 710 - DNA, 401 bp, Homo sapiens
ttctaggagtttggctcaattcagggctaacaaaaaaatctgtttagggccacttggggattagtgattctcaaaaggtagtccttgaatcacttactgaatacctatagttgaagaacagataactgcattttaacaagattcaaaggcaaattaatgtttgatgaccgttgacatcaagtctcagaatcagaactgttyaacttccaagcaaatgaaattactaaactcacttctctgagtgaggctgagagcaagaagttaagtataatgttttttgagctaaaatacagagtctactatcagaatcctgtttcccaccataaggattaagatttttttgtttttgtgtgtgtatgtgtgtgtgtgtgtgtgaatgtgtgtgtgtgtgtttgtttttt

SEQ ID NO: 711 - DNA, 401 bp, Homo sapiens
ctctactccctgctgcatacaacttccttctttctatctataaatactatatctgctctagaaacgtgaaaaataacataaatattgaacagagtgtgaaggaatttaaactttattgatgagtagtagtattacccttctggactgatgcagatgagagcaccataaagacaaagtgagttcttttggtccttaagccaygaattggagtctggatagtagggatggaaatgggttattagatcatcagttcactttcctctccaagcagcaattaaatttgttttctttgtctcagcttactcgttgctcaaaaaaaagaaacatttcagctcctcttcatggggaataagaccaaacatagaacacttttctcttaacatgtgtggtgcttgagagga

SEQ ID NO: 712 - DNA, 401 bp, Homo sapiens
tacagctgactccaagatgagtgtgatgctatcacggtgcaggataacagagatgtaccgcgaacccaacactcaagatgggaatgataaaacttcaataacaaaaacaaaaaaacaaaacaagccacactatcctttcagccttcagggatcgcctccttaaactgttttctaaaatctttctgcactttatatcaggtrcaggagaagtagactacatacattatttgttgtctatctttgaaaggatttcattccctctactgcacttaatcattcccttatctgaatattaactcagtgtaaagcttcccaaattttccaagttcttgaaagagagcaaaacatattgcaaagctctatatgtttcctgctagatatatttcgtgaaagacttcatt

SEQ ID NO: 713 - DNA, 401 bp, Homo sapiens
tgctctgaaactttgtgcatttgagggtttttttttccccgtgatttggtggactgcaagggcacacaaaactagcttatttttcctagtcaggcagttttgaatagaaggtgattgtgttttccagagataagtatgtaagtcttttctgctaccggaggaggattctattttagtagtctattaagtagacaataagcrctgagttatgagttgataagtggatctgcttaccacctagaaacatcaattgaaaccacagcttatggtttcttactgcctctttttggtttctcactgagtctttctggttattgttatcatttcgtttttgacttgggcttggactgttcagcttggctgtgttaatttttcagaatcaatgacttttatagttactt

SEQ ID NO: 714 - DNA, 401 bp, Homo sapiens
ttttcctcctgcattttatttaagcaattcactaactatttataagaccatctttgaaagcctgagatacatatctaggcaaatatccatggaaaaaataaacactctgcaaatttgcaaacaaatacagcaattgccaaagtagggttatcttttgcaatcagtactgtggtttcagtttgaaaaaataaagctttcttrtcagttttgctccaagggctatctgattcggtgtgtagtcggtgaggaaataaatacaggtataataatctgtgcttgctcaaaaattaaaaaatcctttaggagggggccaggcgtggtggctcatgcctgtaatcccagcaatttgggaagcagaggcagacagtttacctgaggtcaggagttcttgagaccagcct

SEQ ID NO: 715 - DNA, 401 bp, Homo sapiens
ggaggaaagatgagctttaaaaaaaaaaaagtgatactggagcaattggatatccaaaggcaaaaaaaaaaagtgcctaaattcatttctcacatcttatacagaaattaactcaaaattgattacagacttaaacataaaatgttaagcaataaaactttaggaaacaaacaggagaaaatgatgaggacctaaagctakgtgaagaacttctagacttgatactaaaagtatgattttcattttaaatgaattttaaaatgaatttcaatgaattttaaaattcattttaatcaactgggacctcatcaaaattaaaacttttgttctgtaagagaccctgtgtaaagaattaaaagaaamactacagagcaggagaaaacatttgccaaccacatatt

SEQ ID NO: 716 - DNA, 401 bp, Homo sapiens
ggaaacaaacaggagaaaatgatgaggacctaaagctakgtgaagaacttctagacttgatactaaaagtatgattttcattttaaatgaattttaaaatgaatttcaatgaattttaaaattcattttaatcaactgggacctcatcaaaattaaaacttttgttctgtaagagaccctgtgtaaagaattaaaagaaamactacagagcaggagaaaacatttgccaaccacatattcaagaaagattttgtacctagagagtataaagaactctcaaaactccacagtaaaatccaaacgatccaattaggaaaatgggcaagaaacataaacagaaattttaccaaagatgatatacagatggaaaataagcacatgaaaagatgttcaatatcatt

SEQ ID NO: 717 - DNA, 401 bp, Homo sapiens
ccaaccacatattcaagaaagattttgtacctagagagtataaagaactctcaaaactccacagtaaaatccaaacgatccaattaggaaaatgggcaagaaacataaacagaaattttaccaaagatgatatacagatggaaaataagcacatgaaaagatgttcaatatcattagccattaggaatatgcaaattaaamcaatgagatagcactatctacctatcaggatggctaaagtaaaaaagagtaataataccaattgctggagaggatgtggagaaactggatcactcatacattgttgatggaaatgtaaaatggtacactctgtaaacaatttgcttgcttcttataaaactaaacatgtatttaccatatgattcagcagttgtgctctt

SEQ ID NO: 718 - DNA, 401 bp, Homo sapiens
caagggaattgtgctaactaaaaataagccaatcacaaaagatttcatgtgatgtgattttatttatataatattcttgaaatgacaaaaatatagaaatggagaacagattagtagtttccaggggtcagagagtagaggagggagggaggtgtgtgtgtccataaaaacgttgcgccagggatcctggtgaggaagctrttctgtatcctcattgctggtgttcacgtgaatctacatatgtgataacatttgatggaaccaaatacacmcacaaacacacacatacacatatgagtgcatataagaccagagaaacttattttggtggattccgtaaatgtcaaatctttggttatgatattgaagtgtagtttggcaagatgttactattggggaaa

SEQ ID NO: 719 - DNA, 401 bp, Homo sapiens
tattcttgaaatgacaaaaatatagaaatggagaacagattagtagtttccaggggtcagagagtagaggagggagggaggtgtgtgtgtccataaaaacgttgcgccagggatcctggtgaggaagctrttctgtatcctcattgctggtgttcacgtgaatctacatatgtgataacatttgatggaaccaaatacacmcacaaacacacacatacacatatgagtgcatataagaccagagaaacttattttggtggattccgtaaatgtcaaatctttggttatgatattgaagtgtagtttggcaagatgttactattggggaaaatagtaacattgtactattgtcctgtgaattattgattcacaggaaattgtaaaaaaaaatgctttgtcct

SEQ ID NO: 720 - DNA, 401 bp, Homo sapiens
aatctttggttatgatattgaagtgtagtttggcaagatgttactattggggaaaatagtaacattgtactattgtcctgtgaattattgattcacaggaaattgtaaaaaaaaatgctttgtcctatacatttttttagaatttcctgtcaatccataattatttcaagataaaaaaagttttgtaaaggaagaattttkgagactctttcagattttttattttgagatttaatcwattatatgagaaaaataagctttaactgaccactctttccttcctatccaaagcttagtcaatgagaaaatgttgcaagagaaggagaatggggggtacctgagactccaggagagtacataccctttttaaaaaagcaatacaagccagcagaaaaaggaar

SEQ ID NO: 721 - DNA, 401 bp, Homo sapiens
atgttactattggggaaaatagtaacattgtactattgtcctgtgaattattgattcacaggaaattgtaaaaaaaaatgctttgtcctatacatttttttagaatttcctgtcaatccataattatttcaagataaaaaaagttttgtaaaggaagaattttkgagactctttcagattttttattttgagatttaatcwattatatgagaaaaataagctttaactgaccactctttccttcctatccaaagcttagtcaatgagaaaatgttgcaagagaaggagaatggggggtacctgagactccaggagagtacataccctttttaaaaaagcaatacaagccagcagaaaaaggaargatgggactctggagcgattatgtgaatctgtggttc

SEQ ID NO: 722 - DNA, 401 bp, Homo sapiens
kgagactctttcagattttttattttgagatttaatcwattatatgagaaaaataagctttaactgaccactctttccttcctatccaaagcttagtcaatgagaaaatgttgcaagagaaggagaatggggggtacctgagactccaggagagtacataccctttttaaaaaagcaatacaagccagcagaaaaaggaargatgggactctggagcgattatgtgaatctgtggttctcaaagttcagcatgcatcagattcccagagggcttgtttaaacaaaaatttctgccctgcaaccacagagtttctgattcactaggtctgggggtggtgggtgtggttcaagaatctgcatttctagaaagttcccatgtgatgttgactccagtgctgatg

SEQ ID NO: 723 - DNA, 401 bp, Homo sapiens
tggagcgattatgtgaatctgtggttctcaaagttcagcatgcatcagattcccagagggcttgtttaaacaaaaatttctgccctgcaaccacagagtttctgattcactaggtctgggggtggtgggtgtggttcaagaatctgcatttctagaaagttcccatgtgatgttgactccagtgctgatgctgctggtcaraccacactctggaaactactgccatagaacatctgagagtcacaatttgaaactgtctcaagaaatttctaagtaaaatgcaatgcaataaattacttaagaattctctatatttacaactctttatttgwatagtttccttccccctcagtatgttggctggtaagaatgttctttttgattattcatctgtgtgggct

SEQ ID NO: 724 - DNA, 401 bp, Homo sapiens
tggttcaagaatctgcatttctagaaagttcccatgtgatgttgactccagtgctgatgctgctggtcaraccacactctggaaactactgccatagaacatctgagagtcacaatttgaaactgtctcaagaaatttctaagtaaaatgcaatgcaataaattacttaagaattctctatatttacaactctttatttgwatagtttccttccccctcagtatgttggctggtaagaatgttctttttgattattcatctgtgtgggctcaagagtgtgtcactgagttaatttacaaagcctcggattgcatatccatcacatttgtagaaagtattatcccagaaaaatccatcaacacaacacataagctccaaaatgtactgcacaattggcgtgc

SEQ ID NO: 725 - DNA, 401 bp, Homo sapiens
tggtaagaatgttctttttgattattcatctgtgtgggctcaagagtgtgtcactgagttaatttacaaagcctcggattgcatatccatcacatttgtagaaagtattatcccagaaaaatccatcaacacaacacataagctccaaaatgtactgcacaattggcgtgcaatagagtagtcaaagaaccaatgaaatgyaaaaagttatctatatggagatctcaaaatgaattaacaaattaaatcctttgacattgtatgagatcccattagggttcattgttacagttttctttaatgtttctaaaatagaaatgttgtcctgggcagagcagtgtaatgtacttgctttggcatcaaatgccacattttttttttttttgagacggcgtcttgct

SEQ ID NO: 726 - DNA, 401 bp, Homo sapiens
ttctttaatgtttctaaaatagaaatgttgtcctgggcagagcagtgtaatgtacttgctttggcatcaaatgccacattttttttttttttgagacggcgtcttgctctgtcacctaggctggagtgagtgtgcagtggtgcaatcgtagctcactgtagcctcgaactcctgggcttaagcaatcctcccacctcagcmtcctgagtagctgggactacaggtcccagstgcccagctatttttaaaattttttgtagagacaagtcttgctatgttgcccwggctgatcttaaactcctagcctcaagaaatccttcagacttgtcctcctagagtgttgggattacaggtgtgagcctccacaccaggcattgtttctattttaactttgctactta

SEQ ID NO: 727 - DNA, 401 bp, Homo sapiens
tcctgggcagagcagtgtaatgtacttgctttggcatcaaatgccacattttttttttttttgagacggcgtcttgctctgtcacctaggctggagtgagtgtgcagtggtgcaatcgtagctcactgtagcctcgaactcctgggcttaagcaatcctcccacctcagcmtcctgagtagctgggactacaggtcccagstgcccagctatttttaaaattttttgtagagacaagtcttgctatgttgcccwggctgatcttaaactcctagcctcaagaaatccttcagacttgtcctcctagagtgttgggattacaggtgtgagcctccacaccaggcattgtttctattttaactttgctacttacgagaagtcttaatttgaccaacaactaat

SEQ ID NO: 728 - DNA, 401 bp, Homo sapiens
tttttttttgagacggcgtcttgctctgtcacctaggctggagtgagtgtgcagtggtgcaatcgtagctcactgtagcctcgaactcctgggcttaagcaatcctcccacctcagcmtcctgagtagctgggactacaggtcccagstgcccagctatttttaaaattttttgtagagacaagtcttgctatgttgcccwggctgatcttaaactcctagcctcaagaaatccttcagacttgtcctcctagagtgttgggattacaggtgtgagcctccacaccaggcattgtttctattttaactttgctacttacgagaagtcttaatttgaccaacaactaatgtaagctctagtttccccatatgtaaaaagaagataatgcctaaattgcaggg

SEQ ID NO: 729 - DNA, 401 bp, Homo sapiens
gggtttattgggagaattaataagaacacgcctaggccaggcacaatggctcatgcctgtaatcccagcactttgggaggccaaggcagctggatcatgaggtcaggagttcgagaccaccctgaccaacgtggtgaaaccctgtctctactaaaaatacaaaaattaggggagtgtggtggtgggcgcctataatcccasctactcaggaggcttaggcaggagaatcacttgaacccgggaggcggaggttgcagtgagccgagatcgtgcaattgcactccagacttggcaacagagcaagactccatctcaaaaagaaaaaagaaaaagaaaaataagaacacgtctaaaataattagtgcagtgtctgacacttaagttctcaaatagtggcggtg

SEQ ID NO: 730 - DNA, 401 bp, Homo sapiens
aaaacttaaagagtttaatatattgctcaaggttatccagtgtattggtttgctagggctctgtaacaaagtaccacaaaccaggtggctcaaacaacagaaatgcattgtttcacagttctggcgtcaaaaagtccaaaatcacagtgttggcagctttggttccttctgagggctgcaagggaaagattgttctgggtmcttctccttggcttgtagatgtctgtcttctccctgtgtctctccatgtcattttttcctctatgcatgtctgtctctgtgtccaaatttttccattttaaaaggacattagtcattgctgggcacaatggctcacacctgcaatcccagcactttgggaggctgagagaggcagatcacttgaggccaggagttcgaga

SEQ ID NO: 731 - DNA, 401 bp, Homo sapiens
cttctccttggcttgtagatgtctgtcttctccctgtgtctctccatgtcattttttcctctatgcatgtctgtctctgtgtccaaatttttccattttaaaaggacattagtcattgctgggcacaatggctcacacctgcaatcccagcactttgggaggctgagagaggcagatcacttgaggccaggagttcgagaygagcctggccaacatggtgaaacgtgtctctgcaaaataatacaaaaattagctaggtatggtggtgcatgcctatagttccagctatttctactcaggaggctgaggcatgagaattgcttgaacccaggaggcagacgttgcagtgagctgagatcatgccactgcactccaacctgggtgacagagtaagactctgt

SEQ ID NO: 732 - DNA, 401 bp, Homo sapiens
aaaaattagctaggtatggtggtgcatgcctatagttccagctatttctactcaggaggctgaggcatgagaattgcttgaacccaggaggcagacgttgcagtgagctgagatcatgccactgcactccaacctgggtgacagagtaagactctgtctcaaaagaaaaaaaaaaaaaaagggcattagtcattggattasggcccaccctatggaactcattttaacttgatgagctctgtaaagaccctatctctaaattatatcacattctgaggtgctgggaggtaacactccaacttatctttattgaggggggcagaattcaaatccatagcacatagtagtaagatgtcatgctgaggtatgaaccagacttcatacgcaatgctgtggactaa

SEQ ID NO: 733 - DNA, 401 bp, Homo sapiens
ttgtgttggaattagcacccttataagaagaaaaaaaggccaaagcctcctctctctctgccacctgaaaatgcaacagggaatggccatccacatgccaagaaatgggcccttatcatacaccaagtcttcctgcacattgatcctcgatttctcaggttttggaactgcaggaaatcgacgttcattgtttaagccacrcagtctatggtattttgttatagctgcctgagctgactaagacaggcaatatatgacatggccgtttgctccaggacttttaggaaatgtggatcccattggtagtgctcagcaatcaaatttatttgatcctcatgttcagcagacatgttgtttttttcttcatgtattgccaactcttttatatgatacataaaaca

SEQ ID NO: 734 - DNA, 401 bp, Homo sapiens
acctaaaccagctgttgagaagtagtggcaaaggccagttgtttcaaagtcatagagatcaggctccttaaaagagaagtatttaaaatgaaaaacattaatatcaaagattatgttaaagaccagagtttaaccctgagcataccagtccagcaaattccaaaaggtgggtggggaaaatctttcagttacacagtaccrttcgttgagtttcttgaagctaggatgtcaatgttcttgatgatgttcagtctcggttagctttcctctaagagaatgaaggacctgagcttttcaccagaatttgttaggggctcagacagtggtttgtgcagggaaaagtctggcctgcgtgtaatctgctgcagtggtgagttcttcaaagtttgaatcaagtagtt

SEQ ID NO: 735 - DNA, 401 bp, Homo sapiens
aatctgggcaatcagatgttatttttcagtgacatcaagttagggaaagagagaaaaattggaaacattaatttgtagggttgtagccagatattgaagcaaactggaaggcttcacagtttggtacaaattaacaatttgggcaagataacaggatccagttcaatttttaggaaggtgtccaaactgctttttccacaraggaggggaagtcatttaaatcattccagacaagtcagaatttgcatatgtatcagttacctgcaatttatgaaactgtataatatggctaagagataattatgtctacaatctgataaacaggaaggagctgcttgctatagttttccactgaaacaaaacatttctctctatagtcacccctcttttgatcaaaaata

SEQ ID NO: 736 - DNA, 401 bp, Homo sapiens
gaaactgtataatatggctaagagataattatgtctacaatctgataaacaggaaggagctgcttgctatagttttccactgaaacaaaacatttctctctatagtcacccctcttttgatcaaaaataatctcaaagaaagattattcttgatcacaaaataaagctagtaccatcagatttggcctgattatttacatkgttgtcttaaagatgataattcactacatagggtttcttatatttgctttgctgaaagttttcataaggaatctcaaattgaatttttaaaaaccacttgaggctaggaagctatatcaagaactcaccaacagatttacctacagtatctataaatttcrgtaaatgcctctcttttagaggtcccaaaaatatctcaa

SEQ ID NO: 737 - DNA, 401 bp, Homo sapiens
taaagctagtaccatcagatttggcctgattatttacatkgttgtcttaaagatgataattcactacatagggtttcttatatttgctttgctgaaagttttcataaggaatctcaaattgaatttttaaaaaccacttgaggctaggaagctatatcaagaactcaccaacagatttacctacagtatctataaatttcrgtaaatgcctctcttttagaggtcccaaaaatatctcaagttttctgagcctgcgaggaagtatcctttacctgtaaatttgggcacctcattagccagraatcaggctgrttttcccaagagggctttaaatgagcatacctaatgtttccaatatttcatgcaaacaaggaagagttttattgaacctatgcaaataa

SEQ ID NO: 738 - DNA, 401 bp, Homo sapiens
ttcataaggaatctcaaattgaatttttaaaaaccacttgaggctaggaagctatatcaagaactcaccaacagatttacctacagtatctataaatttcrgtaaatgcctctcttttagaggtcccaaaaatatctcaagttttctgagcctgcgaggaagtatcctttacctgtaaatttgggcacctcattagccagraatcaggctgrttttcccaagagggctttaaatgagcatacctaatgtttccaatatttcatgcaaacaaggaagagttttattgaacctatgcaaataactataattttgaaatataatgagaatactcagtaagaatttctgatttctctaacagtcaggcaggaagaaaaagataccaatgacaaatgtttcattta

SEQ ID NO: 739 - DNA, 401 bp, Homo sapiens
tctcaaattgaatttttaaaaaccacttgaggctaggaagctatatcaagaactcaccaacagatttacctacagtatctataaatttcrgtaaatgcctctcttttagaggtcccaaaaatatctcaagttttctgagcctgcgaggaagtatcctttacctgtaaatttgggcacctcattagccagraatcaggctgrttttcccaagagggctttaaatgagcatacctaatgtttccaatatttcatgcaaacaaggaagagttttattgaacctatgcaaataactataattttgaaatataatgagaatactcagtaagaatttctgatttctctaacagtcaggcaggaagaaaaagataccaatgacaaatgtttcatttatatttgcaaag

SEQ ID NO: 740 - DNA, 401 bp, Homo sapiens
ttaaatgagcatacctaatgtttccaatatttcatgcaaacaaggaagagttttattgaacctatgcaaataactataattttgaaatataatgagaatactcagtaagaatttctgatttctctaacagtcaggcaggaagaaaaagataccaatgacaaatgtttcatttatatttgcaaagcatagacttctgaattrttatgagtttcagttagtttaagagaaaatagaaakaagtttcctatgtccaaaaaatcaaccattaaaatatcagcaatattccaaacaaaagctacagtcattcctcatcagttccttcagtcctgtgtaattcttgctctgcttcctcttggcttaacagtttcatgcatacatctgcctctccaaacagggctctg

SEQ ID NO: 741 - DNA, 401 bp, Homo sapiens
caaacaaggaagagttttattgaacctatgcaaataactataattttgaaatataatgagaatactcagtaagaatttctgatttctctaacagtcaggcaggaagaaaaagataccaatgacaaatgtttcatttatatttgcaaagcatagacttctgaattrttatgagtttcagttagtttaagagaaaatagaaakaagtttcctatgtccaaaaaatcaaccattaaaatatcagcaatattccaaacaaaagctacagtcattcctcatcagttccttcagtcctgtgtaattcttgctctgcttcctcttggcttaacagtttcatgcatacatctgcctctccaaacagggctctggaaatcctgactcagtctgctggtatggtctcaagg

SEQ ID NO: 742 - DNA, 401 bp, Homo sapiens
gtgtaattcttgctctgcttcctcttggcttaacagtttcatgcatacatctgcctctccaaacagggctctggaaatcctgactcagtctgctggtatggtctcaaggttgtgtaagtgacggcatcagaagcttctgccccaaatgaaaagtacctggcatagagctttgccatggggctctgagataatcctttgttragacaaagcactacagctagatttgtaagagctttcagggaagcaccacaaagcaaaattctatttgtaaatgacaaaagccttaaaaattactttgaaaaatcattttcaaacgtgaaagatgtaaggagtgtttatcacaagaatctccatttgaaaaatactggcttataggcacagaaaaacaaagatagtatgtt

SEQ ID NO: 743 - DNA, 401 bp, Homo sapiens
aaattgggaagagtaaatttcaaatgttctcacacaacaaaatgactagtatttgaagtgatgtcgttaactggctcaatttaattattccacatggtaggcataaatcatattatcactttgtaccccatatacttacaatatcataaattgtcaatttacagtttttttttaaaaaaaaggaaagcactggcttagaakaagctaatttgaaattaacgaataaaagttgttaccaagttaacattttaaaaataactgaaacttatgactcatgtggtgctctctaataacagggcaaagtgacatcgggactcaaagaaaaacacgttatggacataaaagcctttgatgactctctaggaattttccatacagcatacaatttctgaaatatttat

SEQ ID NO: 744 - DNA, 401 bp, Homo sapiens
aaacttatgactcatgtggtgctctctaataacagggcaaagtgacatcgggactcaaagaaaaacacgttatggacataaaagcctttgatgactctctaggaattttccatacagcatacaatttctgaaatatttatactgataacattctgcccatacagatttgtcctagggaaggttaagcatctcttctgagtwggcaatgactcccgtgcaatttgtaaatagtaacatatcaaataaacctaattcttttcagcaactttcttttcataaggtgaaataacaaatcctttgtgattttcaaaggccctctgggagatatcaaagacagtttcagatgcaatagatatcacttaggaatcagttttgggagggaaaatatcaaaagttgtcag

SEQ ID NO: 745 - DNA, 401 bp, Homo sapiens
actaggatacggtcgtgagttactgataaacaatactttgctaccttaactaaggtgacagcaaaaagagtgaaaaagtaagcacaggcagtaacatgattgtaaagaatcttagctttttcaaaagggagaagactttattaaataagcaaggacgtgataaactcaatacacaatataggaagttattttaagacatgkaatctttgccttctaggcagattactcagaaggtaaagaaaaaatattattaagagtagactaagaagtyaagaaaatgttatgtttttaaacagaggcaaaattaaattctactttgcatcattatggcatttgatattaaagatctttttgaaatcttataaatgaattcatcaagccttagctagcactgaccacag

SEQ ID NO: 746 - DNA, 401 bp, Homo sapiens
tgaaaaagtaagcacaggcagtaacatgattgtaaagaatcttagctttttcaaaagggagaagactttattaaataagcaaggacgtgataaactcaatacacaatataggaagttattttaagacatgkaatctttgccttctaggcagattactcagaaggtaaagaaaaaatattattaagagtagactaagaagtyaagaaaatgttatgtttttaaacagaggcaaaattaaattctactttgcatcattatggcatttgatattaaagatctttttgaaatcttataaatgaattcatcaagccttagctagcactgaccacagcaaagtttgtttcccacaagcgttttacaactttctacgtctattcagcttttgtcctacacattaacaa

SEQ ID NO: 747 - DNA, 401 bp, Homo sapiens
aggaagaacattcacaagtagaatagaagcatacttgtgttatatttaacactaaaaactcagagaaaacagctatttttactaaatcaacctcattaattgattatcaaaataataattattgttaaatattgtttgccaaacatttacctagattttgtgaacttgaattattgtctctgagttatgttcctacaagakacagctttttcccctacagtaaaagtgtttaaggctcaatttcctcaacttctgggaatttgggaaatatttggtttatataaatggttatttatttctaagccaattagaatagagctcctttaagagattctataacctaatttagcgacaccatcctgaggtagggaaatattttatttttatttttttcagagatg

SEQ ID NO: 748 - DNA, 401 bp, Homo sapiens
ggtttatataaatggttatttatttctaagccaattagaatagagctcctttaagagattctataacctaatttagcgacaccatcctgaggtagggaaatattttatttttatttttttcagagatgggctagattagaactcctgccttcagcctcctgagtagctaaggttgcaacttccatagtagctgaaattgtrggtgcatgccaccrtatctggccaacagggaaatattacatactctaacaatgagtggtgacwtcctttctgaattacagacatgtagacattaaagcagagatagcaagaatttagtttccattctaacatttaagccatgggtcaagagtggacacagaatcacaaaacttactgtttcatatcaaagagctgttctg

SEQ ID NO: 749 - DNA, 401 bp, Homo sapiens
gttatttatttctaagccaattagaatagagctcctttaagagattctataacctaatttagcgacaccatcctgaggtagggaaatattttatttttatttttttcagagatgggctagattagaactcctgccttcagcctcctgagtagctaaggttgcaacttccatagtagctgaaattgtrggtgcatgccaccrtatctggccaacagggaaatattacatactctaacaatgagtggtgacwtcctttctgaattacagacatgtagacattaaagcagagatagcaagaatttagtttccattctaacatttaagccatgggtcaagagtggacacagaatcacaaaacttactgtttcatatcaaagagctgttctgttctcatgattctt

SEQ ID NO: 750 - DNA, 401 bp, Homo sapiens
taacctaatttagcgacaccatcctgaggtagggaaatattttatttttatttttttcagagatgggctagattagaactcctgccttcagcctcctgagtagctaaggttgcaacttccatagtagctgaaattgtrggtgcatgccaccrtatctggccaacagggaaatattacatactctaacaatgagtggtgacwtcctttctgaattacagacatgtagacattaaagcagagatagcaagaatttagtttccattctaacatttaagccatgggtcaagagtggacacagaatcacaaaacttactgtttcatatcaaagagctgttctgttctcatgattcttaagtgatttgagctcaaaacagacaaacagaaaagcgtagcaaaccaaa

SEQ ID NO: 751 - DNA, 401 bp, Homo sapiens
agggcccaaataagccttattacctgtgttgagtaaacaaagatcccagtgcaggagatccatatcatggcaccaaactatcaaatacaggatgcactaggtcattaaagagaagattttattcaaagcattgcaaaatggagaacattgatttatggtgaatatcttgaagaaaaggaagggggtctggggttctatagrggcaagaaaaaacgggagtcatccagaagtcttataaaagtcatgaagaagggtggagatgggtcttatctcagaatatgggaaggcagtttgggcctttgcattagttgtttgccagacactaaagggtagagaggtttcttaatcattactcttttccrgaagcacagggctcaggtaagattgaatatttttcatgc

SEQ ID NO: 752 - DNA, 401 bp, Homo sapiens
atatcttgaagaaaaggaagggggtctggggttctatagrggcaagaaaaaacgggagtcatccagaagtcttataaaagtcatgaagaagggtggagatgggtcttatctcagaatatgggaaggcagtttgggcctttgcattagttgtttgccagacactaaagggtagagaggtttcttaatcattactcttttccrgaagcacagggctcaggtaagattgaatatttttcatgcctttcatcctctctgtctgatctctttcaaacygtcttttttgttgaggctatatgaaatgtttactgttttaccttccaatcaactccataaaaacggttgatataaagcatctagccaagttccactacattttagtcattcattatggaacatcatcc

SEQ ID NO: 753 - DNA, 401 bp, Homo sapiens
tataaaagtcatgaagaagggtggagatgggtcttatctcagaatatgggaaggcagtttgggcctttgcattagttgtttgccagacactaaagggtagagaggtttcttaatcattactcttttccrgaagcacagggctcaggtaagattgaatatttttcatgcctttcatcctctctgtctgatctctttcaaacygtcttttttgttgaggctatatgaaatgtttactgttttaccttccaatcaactccataaaaacggttgatataaagcatctagccaagttccactacattttagtcattcattatggaacatcatcccaaggaaggctttattctctctgtctaagcaagcaatgaagggagatcttttggaaatggcctagtatttga

SEQ ID NO: 754 - DNA, 401 bp, Homo sapiens
aaaacttcacagtgtatgatgacactgataccttctagtctattcccagctgttctatttcatttttttatagcttatagtgactcattaaaatggatttccacgaatgcaatgcaacacacagtttgaagtccactggaaaatcttttaaaactgttattataaaatgaatttagtaaccttttcaaaattttactagtrtagtttctgtggtttttaagaatacaaatattttgccttctggtcttttttttcacacaagtatatggcagattcctataaatattttaatagatcagcagtttccaatgccatgtttcggtgatgatattttaccagagatagtctgtaatgaaaaattgagacaaatgatgacaatgtaatttgcagacatgtatact

SEQ ID NO: 755 - DNA, 401 bp, Homo sapiens
ttaatagatcagcagtttccaatgccatgtttcggtgatgatattttaccagagatagtctgtaatgaaaaattgagacaaatgatgacaatgtaatttgcagacatgtatacttatttataataaatttgtagacatgtatatttagttagttattcaacaaatattcagtgccttttatatcttaagaatggttcatgwtaattggaggcaaacaagaaaggcaaagttactgcttagttgaaatttacattctagtataaaaattgccatatttattattattattattattatacttaaagttctgggatacatgtgcagaatgtgcaggtttgttacataggcatacgcttgccatggtggtttgttgcacccatcaacccatcatctacattagg

SEQ ID NO: 756 - DNA, 401 bp, Homo sapiens
tgggatacatgtgcagaatgtgcaggtttgttacataggcatacgcttgccatggtggtttgttgcacccatcaacccatcatctacattaggtatttctcctaatgctatccctccccgctccccccaccccacaacaggccctggtgtgtgatgttcccctccctgtgtccatgtgttctcactgttcaactcccactwatgagtaagaatatgcagtgtttgtttttctgttcctgtgttagtttgctgagaataatagctttcagcttcatccatgtccctgcaaaggacacaaactcaaccttttttatggttgcrtagtattttgtggtgtatatgtggcacattttctttatccattctatcattgatgggcatttgggttggatccaagtctt

SEQ ID NO: 757 - DNA, 401 bp, Homo sapiens
ctccccccaccccacaacaggccctggtgtgtgatgttcccctccctgtgtccatgtgttctcactgttcaactcccactwatgagtaagaatatgcagtgtttgtttttctgttcctgtgttagtttgctgagaataatagctttcagcttcatccatgtccctgcaaaggacacaaactcaaccttttttatggttgcrtagtattttgtggtgtatatgtggcacattttctttatccattctatcattgatgggcatttgggttggatccaagtctttgctattgtgaatagtgctacaataaacatatgtgtgcatgtgtctttataatagagtgacttataatcctttgggtgtatacccagtaatgggattgctgggtcaaatggtatttctgg

SEQ ID NO: 758 - DNA, 401 bp, Homo sapiens
gcccatgcctatgtcctgaatgatactgcgtcagttttcttccagagttttatggttttaggtcttatgtgtaagtctttaatccatcttgagttaatttttgtataaggtgtaaggaagaggtccagtttcagttttttgcatatggctagccagttttcccaacaccatttattaaatagggaatcttttccccattgyttgtttttgtcaggtttgtaaaaaatcagatagttgtagatgtgtggcattatttctgaggcctctgttctgttccattggtctatatatctgttttggtaccagtaccatgctgtttgggttactgtagccttgtagtatagtttgaagtcaggtagcttgttgcctccagctttgttctttttgcctaggattgtctt

SEQ ID NO: 759 - DNA, 401 bp, Homo sapiens
ttgtagatgtgtggcattatttctgaggcctctgttctgttccattggtctatatatctgttttggtaccagtaccatgctgtttgggttactgtagccttgtagtatagtttgaagtcaggtagcttgttgcctccagctttgttctttttgcctaggattgtcttggctatacaggctctcttttggttccatatgaamtttaaagtagttttatctaattctgtgaagaaagtcaatrgtagcttgatggggatagcattgaatctataaattactttgggcagtatggccattttcatgatattgattcttcctatccatgagcatggaatgtttttccatttgtttgtatcctctcttatttccttgagcagtggtttgtagttctccttgaagac

SEQ ID NO: 760 - DNA, 401 bp, Homo sapiens
tccattggtctatatatctgttttggtaccagtaccatgctgtttgggttactgtagccttgtagtatagtttgaagtcaggtagcttgttgcctccagctttgttctttttgcctaggattgtcttggctatacaggctctcttttggttccatatgaamtttaaagtagttttatctaattctgtgaagaaagtcaatrgtagcttgatggggatagcattgaatctataaattactttgggcagtatggccattttcatgatattgattcttcctatccatgagcatggaatgtttttccatttgtttgtatcctctcttatttccttgagcagtggtttgtagttctccttgaagacgtccttcacatcccttgtaagttgtattcctagggatttt

SEQ ID NO: 761 - DNA, 401 bp, Homo sapiens
tccatttgtttgtatcctctcttatttccttgagcagtggtttgtagttctccttgaagacgtccttcacatcccttgtaagttgtattcctagggattttattctctttgtagccattgtgaatgggagttcactcatgatttggctctctgtttttctattattgatgtataggaatgcttgtggtttttaaacattgwttttgtattctgaaactttgctgaaattgcttatcaktttaaggagattttgggctgagaagatggggttttctaaatgtacaatcatgtcatctacaaacagagacaatttgacttcctcttttccaatttgaatatactttatttctttctcttgcctgattgccctggccagaacttccaatacaatgttgaatagg

SEQ ID NO: 762 - DNA, 401 bp, Homo sapiens
tggtttgtagttctccttgaagacgtccttcacatcccttgtaagttgtattcctagggattttattctctttgtagccattgtgaatgggagttcactcatgatttggctctctgtttttctattattgatgtataggaatgcttgtggtttttaaacattgwttttgtattctgaaactttgctgaaattgcttatcaktttaaggagattttgggctgagaagatggggttttctaaatgtacaatcatgtcatctacaaacagagacaatttgacttcctcttttccaatttgaatatactttatttctttctcttgcctgattgccctggccagaacttccaatacaatgttgaataggagtggtgacagagggcatccttgtcttgtgccagttt

SEQ ID NO: 763 - DNA, 401 bp, Homo sapiens
tgattgccctggccagaacttccaatacaatgttgaataggagtggtgacagagggcatccttgtcttgtgccagttttcaaatgcttcctgtttttgcctattcagtatgatattgcctggggggttgccataaatgactcttattatttttggatacattccatcaataggtagtttattgagagcttttagcatgaartagcattgaattttatggaaggccttttctgcatctattgagacaatcatgttgtttttgtcattggttctgcttatgtgatggattacgtttattggtttgtgtatgttgaaccagccttgcatcccagggatgaggctgacttgatcgtggtggataagctttttgatgtgctgctggattcagtttgccagtatttt

SEQ ID NO: 764 - DNA, 401 bp, Homo sapiens
tgttttgcctctgccaggttttgctatcaggatgatgctggcatcataaaatgagttagggagaagtacctctttttctgtcatttggaatggtttcagaaggaatggtaccagctcctctttgtacctctggtagaaatcggctgtgaatctgtctggtcttgggcttttcgattggtaggctattaattactgcctcartttcagaacttgttattggtctattcagggatttsacttcttcctggtttagtcttgggagggtgtatgtgtctaggagtttatcaatttcttctagattttctagtttatttgcgtagaggtgtttatagtattctctgatggtagtttgtatttctgtgggatcagtggtgatatccccttcatcatttttttattgt

SEQ ID NO: 765 - DNA, 401 bp, Homo sapiens
tgctggcatcataaaatgagttagggagaagtacctctttttctgtcatttggaatggtttcagaaggaatggtaccagctcctctttgtacctctggtagaaatcggctgtgaatctgtctggtcttgggcttttcgattggtaggctattaattactgcctcartttcagaacttgttattggtctattcagggatttsacttcttcctggtttagtcttgggagggtgtatgtgtctaggagtttatcaatttcttctagattttctagtttatttgcgtagaggtgtttatagtattctctgatggtagtttgtatttctgtgggatcagtggtgatatccccttcatcatttttttattgtgtctatttgattcttctctcttttcttctttatta

SEQ ID NO: 766 - DNA, 401 bp, Homo sapiens
tgttctcattggtttcaaagaacttatttatttctgccttcatttcattatttacccagtagtcattcaggagcaggttgttcaggttccatgtagttgtgtggctttgagtgagtttcttcatcctgagttctaatttgattgcactgtggtcaaagagactgttatgatttccattcctttgtgtttgctgaggagtgyttcacttccaattatgtggtcagttttagaataagtgagatgtggtgctgagaagaatgtawattctgttgatttggggtgtagagttctgtagatgtccattaagtctgcttagtccagagctgagttcaatggaatatccttgttaattttctgtcttgttgatctgyctaatgttgacagtcaggtattaaagtccc

SEQ ID NO: 767 - DNA, 401 bp, Homo sapiens
tcattcaggagcaggttgttcaggttccatgtagttgtgtggctttgagtgagtttcttcatcctgagttctaatttgattgcactgtggtcaaagagactgttatgatttccattcctttgtgtttgctgaggagtgyttcacttccaattatgtggtcagttttagaataagtgagatgtggtgctgagaagaatgtawattctgttgatttggggtgtagagttctgtagatgtccattaagtctgcttagtccagagctgagttcaatggaatatccttgttaattttctgtcttgttgatctgyctaatgttgacagtcaggtattaaagtccccactattattgtgtgggagtctaagtctctttgtaggtctctaagaacttgctttatgaatc

SEQ ID NO: 768 - DNA, 401 bp, Homo sapiens
tttccattcctttgtgtttgctgaggagtgyttcacttccaattatgtggtcagttttagaataagtgagatgtggtgctgagaagaatgtawattctgttgatttggggtgtagagttctgtagatgtccattaagtctgcttagtccagagctgagttcaatggaatatccttgttaattttctgtcttgttgatctgyctaatgttgacagtcaggtattaaagtccccactattattgtgtgggagtctaagtctctttgtaggtctctaagaacttgctttatgaatctgggtgctcctcatattgggaatctggttgctccttgtatttggatgygtatatatttaggatagttaactcttcttgttgcattgatctctttaccattacataatg

SEQ ID NO: 769 - DNA, 401 bp, Homo sapiens
gcttagtccagagctgagttcaatggaatatccttgttaattttctgtcttgttgatctgyctaatgttgacagtcaggtattaaagtccccactattattgtgtgggagtctaagtctctttgtaggtctctaagaacttgctttatgaatctgggtgctcctcatattgggaatctggttgctccttgtatttggatgygtatatatttaggatagttaactcttcttgttgcattgatctctttaccattacataatgcccttctttgtctttatctttattgatttgaagtctgttttatcagagactaggattgcaacctctgctttttcttgctttccatatcttggtaaatattcctccatccctttattttgagcctgtgtgtgtctttgcac

SEQ ID NO: 770 - DNA, 401 bp, Homo sapiens
tgtctcctgaatacagcacaccaatgggtcttgactctttctccaatctgccagtctgtgtctttaattggggcatttagcccatttacatttaaggttaatattgttatatgtgaatttgatcctgtcattatgatgctagctggttattttgcctgttagttgatgcagtttcttcatagtgtcaatggtccttacaawttggtatgtttttgtggtggctgttaccaktttttcctttccatatttagtgcttccttcaggagctcttgtaaggcagacctggtggtggcaaaacctctcagcatttgtttgtctgtaaaggattctatttctccttcacttatgaagcttagtttggctggatatgtaattctgggttgaaaattcttttctttaag

SEQ ID NO: 771 - DNA, 401 bp, Homo sapiens
ttgactctttctccaatctgccagtctgtgtctttaattggggcatttagcccatttacatttaaggttaatattgttatatgtgaatttgatcctgtcattatgatgctagctggttattttgcctgttagttgatgcagtttcttcatagtgtcaatggtccttacaawttggtatgtttttgtggtggctgttaccaktttttcctttccatatttagtgcttccttcaggagctcttgtaaggcagacctggtggtggcaaaacctctcagcatttgtttgtctgtaaaggattctatttctccttcacttatgaagcttagtttggctggatatgtaattctgggttgaaaattcttttctttaagagtgttgaatattggcccccaatctcttct

SEQ ID NO: 772 - DNA, 401 bp, Homo sapiens
gtcgatacttgtgtatgcttcgcaaagttctcatgcagtgtttttcagctccatcaggtctttatgttcttctgtaaagtggttattctagtaagcaattcctctaaccttttttcaagtttcttaccttccttgcattgggaggagcttgttattacccaccttctgaagcctaattctgtcaattcatcaaactcattmtccatccagttttgttcccttgctggtgaggagtttgtgatcctttggagragaagaggtgttctggtttttggaattttcaggctttttgcactgatttatcctcatctgtgtggatttatctacctttggtctttgatactggtgacctttggatggggtttttgtgtggatgtcctttttgttgatattgatgctat

SEQ ID NO: 773 - DNA, 401 bp, Homo sapiens
catcaggtctttatgttcttctgtaaagtggttattctagtaagcaattcctctaaccttttttcaagtttcttaccttccttgcattgggaggagcttgttattacccaccttctgaagcctaattctgtcaattcatcaaactcattmtccatccagttttgttcccttgctggtgaggagtttgtgatcctttggagragaagaggtgttctggtttttggaattttcaggctttttgcactgatttatcctcatctgtgtggatttatctacctttggtctttgatactggtgacctttggatggggtttttgtgtggatgtcctttttgttgatattgatgctattcctttctgtttgttagttttccttctaacaggcctctctactgcaggtct

SEQ ID NO: 774 - DNA, 401 bp, Homo sapiens
tgactacagcatctttgctgagctgtggtaggctctgccaagtacgaacttcttggtgctttatttacactgtgaggggaaaactgcctactgaagcctcagtaatggtggacacccctcccctaaccaagctagagtgtcccaggtggacttcagactgctatgctggcagcgagaatttcaagccagtggatcttagcytgctgggctccatgtgggtgggatccgctgagctagatcacttggctccctgactccagccccctttccaggggagtgaacagttctgtctcactggcattccaggtgccactggtatgaaaaaaaactcctgcagctagcttggtgtctgcccatatggtaaccagttttgtgcttcaagccatatttcttttattgga

SEQ ID NO: 775 - DNA, 401 bp, Homo sapiens
atatagtgttagtagctgacgatttttttttcttcaaaaataaatttggaaacttgtcagtccataatttttttaagtattattttactatctcatgaaatctgaaaggctagaatacactagataactcttgatttccactcctaccctgccatgaagtgataattcacatctggctataacttcataaaaggggcaggrcgacccacttcctaaaagaccactattgacttgaagacctgtgtctcttgtctcacttctaaaagtgatttaaaactcaataactcactctgaaatccactgtataagaaatagtaatgtttagggtcatttaaaagaaagattagtttaataaattttggcaccctgtttaacatataaaaccatgaccatgtgttaag

SEQ ID NO: 776 - DNA, 401 bp, Homo sapiens
atgtgattcaaaagactgatttaatagctatagtccaagaagtgttgaaaactcttgcccagtttatggtttccaatataggacacatatcaacagaataagaaactcaagaattaaactgatgactgtgtcgacctctggaggaactcttttttaagacacaaagccaaattttcaccttcatttatgcacactcatctyctgaaggcttmcttatgcatttacgtgtgaaggaaggagaggatttgactcagtctctttgtctgtcatctttcttcctctctcattctgaaatagcttttcacagttgaggaaaaaataaagatttgaccttcccacagtgaatgataacaatgataacagctgatctttatatagtgtttattatatgacagagatca

SEQ ID NO: 777 - DNA, 401 bp, Homo sapiens
aagactgatttaatagctatagtccaagaagtgttgaaaactcttgcccagtttatggtttccaatataggacacatatcaacagaataagaaactcaagaattaaactgatgactgtgtcgacctctggaggaactcttttttaagacacaaagccaaattttcaccttcatttatgcacactcatctyctgaaggcttmcttatgcatttacgtgtgaaggaaggagaggatttgactcagtctctttgtctgtcatctttcttcctctctcattctgaaatagcttttcacagttgaggaaaaaataaagatttgaccttcccacagtgaatgataacaatgataacagctgatctttatatagtgtttattatatgacagagatcatttcatgcact

SEQ ID NO: 778 - DNA, 401 bp, Homo sapiens
tactagcctttttaagatagacattgctgacacatggacagggattgaattagtacaaatattaaatatcattaagccttcttttttgagttctgtctgcacatcaacttcacctgaagaatgtttgtaaaatacacatgcttgttccccacccaaaatctattgaatcagaatctctagggagtgaggaccaacagttgygcttttaacacctccactccccccttgtattggacggtaaaggccagaaaagattaccttaggcattctcatttcagaagctaaaacagacattcaattttctataccctaatttgggacttatatctgagtgttaatatatgcatgtaatactttgtgatgaatgttaaatgtgttttaatagtgttcccttgcagaat

SEQ ID NO: 779 - DNA, 401 bp, Homo sapiens
ttctatctaaggaagatgagttccttagttctgggaaaacaccattgaggaaggatgcttcagaagaggaagggatgtcagccagggcagataaaattagcaagaaatattaagattaagtgctatctaagaggtacaaaaaataatagtgtttcacctcaatagaatcttattgttaaaaatacagtgtatctacagttytgaagattatcaaaacacaatattctagccccaaaacaggaaaagaataatgattcttaagaaaaaattctttctgggctgggtagggtggctcatgcctgtcatcccagcactttggaaggctgaggtgggtggatcatgaggtcaggagatcgaaatcatcctggctaacccagtaaaaccacgtctctactaaaaat

SEQ ID NO: 780 - DNA, 401 bp, Homo sapiens
cagtcattaccatgagcagtcaataattccctgaatccctgttggacagaattacatcaggtacatgtgttgtgatgttttctgttttgagttctgtttgttttttatttattggtaattcagataatctcagtttcaggaatttgttttcttctctcctaaaatggagctgatgttcatctcttccttatgttatacctrtatttatgcaccaatttcatagaaaaccatcgtgcattttcccatggaattttgggtgacagtttaagatcagcgtttactataatgggcagacttaaaatggtccccgtgatccctgactcctgaagttcactcccttgtatgcttccccctctttgaatgtcagcggacctttaacctagagaatacagcagagttgg

SEQ ID NO: 781 - DNA, 401 bp, Homo sapiens
aacaattaatagtcataattgatagttttatgcatgaaaattaagtattgctcctgcaaaactgaggagttaatgtctttacgtgctttttcacaaacattccttataatggaacaccaaatgcctacaatttgaacacatggctggtggaaaaaaagaagaaaaagaaaatcaatcctaagccagaaatctgaaaaaagrcagtgactttgggtcattttgtaatcatctttggtgcttcagtgactaaaaaatacatgcagagtgcaagagcaccttgctgaatcctacaccctgccctccttgtgcagttatgttacatgcaactccaaagcctccacagctgttgtctctactctccattcaaaacaatgcacgtgcaactttcccttgtggctggc

SEQ ID NO: 782 - DNA, 401 bp, Homo sapiens
ttcctgtggagcctccttcctctccaaggaatttgtcgcatgggactgcataattcagttgtccattcagtcaacagtgatttactaacaacctactttgtgttaggcactgttccagggtctgcgcattcagcagtgagcaaaataacacaaaatgcttgctctcatgaacctggagacagacggtaagaatatacagcrataggcaacatggtaggtggggatgagtgctctgaattaaaataaggcaggacacagagatggagagtgacctggacaggacagggttggcagctcagaagtgcattatctacagtggtcagggaagcctctccagtgaaaggacattaagacggagctgaaggaagggagagagtggatgaaagagcaaaatccctgga

SEQ ID NO: 783 - DNA, 401 bp, Homo sapiens
ggatgaaagagcaaaatccctggaactgggacatgcttggcaggttgagtgtccacaagagccccaattaactacaggagggtgagcaaggagagagtagagggagttgaggttagagaagtaaccgtacgtcaaattatggaggactgagtttctcaaactccagtgtctgcgcaaatcccccagggatcttgtgaaacsacaggccttgatttagaagatctgcggcaggcccagggtctgcattcctaccatgcccccagatgatgcccctgcctctaccgttccccagaccatgctttgagtagcagagatgaaggccttcttgcccacagtacaaattctgctatttctttcctgttaatttgaattggtatgcaacaactgtacatatttatggg

SEQ ID NO: 784 - DNA, 401 bp, Homo sapiens
tctgtcccccaggctggagtgcaatgtcacaatcataattcactgcagcctccactcccagggcacaaatgaccttctgcctgagcctactgagtagctaggactacaggtatgcaccaccacaccctgccaatgttatattttttgtagaggaaggttctccctgtgttgatgaggctgctttggatgcttttaaatagwggggaaataggatcagactcatttttagggagcccctctggctgctctgtgaaaayagggcaagggaggaaataggagacctcctgggagataactggagtagtctgggtgagatacttcagtgccagcatctaaggtacttgcaggtgggacagccacaacgaatgccacttcaagtgaatgtgaggatcagctctgct

SEQ ID NO: 785 - DNA, 401 bp, Homo sapiens
cccagggcacaaatgaccttctgcctgagcctactgagtagctaggactacaggtatgcaccaccacaccctgccaatgttatattttttgtagaggaaggttctccctgtgttgatgaggctgctttggatgcttttaaatagwggggaaataggatcagactcatttttagggagcccctctggctgctctgtgaaaayagggcaagggaggaaataggagacctcctgggagataactggagtagtctgggtgagatacttcagtgccagcatctaaggtacttgcaggtgggacagccacaacgaatgccacttcaagtgaatgtgaggatcagctctgctgcccaygtggaaacataagtaaggttgttacctgtggccttgcagaagcctgcaag

SEQ ID NO: 786 - DNA, 401 bp, Homo sapiens
aataggatcagactcatttttagggagcccctctggctgctctgtgaaaayagggcaagggaggaaataggagacctcctgggagataactggagtagtctgggtgagatacttcagtgccagcatctaaggtacttgcaggtgggacagccacaacgaatgccacttcaagtgaatgtgaggatcagctctgctgcccaygtggaaacataagtaaggttgttacctgtggccttgcagaagcctgcaagtcaaaggccttttgatggttggtgaaaatcacatctgatatgcgtgattccaggaagctcatctgcctcattcctgaatttaatttctatccatgaygcacatattactattgcattaaacgtgaagtcattgcctcctgccattgtaat

SEQ ID NO: 787 - DNA, 401 bp, Homo sapiens
cagccacaacgaatgccacttcaagtgaatgtgaggatcagctctgctgcccaygtggaaacataagtaaggttgttacctgtggccttgcagaagcctgcaagtcaaaggccttttgatggttggtgaaaatcacatctgatatgcgtgattccaggaagctcatctgcctcattcctgaatttaatttctatccatgaygcacatattactattgcattaaacgtgaagtcattgcctcctgccattgtaatgtatgcatgctattgcagaggaaatgtttttatctacctcccaaataagtaagcataacttgagctcgcattacaaaatgacacaataaactaaaaaggaattcatttaatatttttaaacatgattttggtgtccttatatttagg

SEQ ID NO: 788 - DNA, 401 bp, Homo sapiens
ttacgttcagatggcacatgtgcaggtttgttacatgggtaaattgcatgttactggggtttggtgtacaaattattttgttacccaggtggtgagcatagcatagtacccaataggtagtttttccctttttttttttttttttttttttttttgagacagaatctcgctctgtcgctcaggctggggtgcagtggtgcratctcagctcactgcaacctccgctcctgagttcaagcgattccccctgcctcagcctcctgagtagttgggatgacaggcacctgccaccaggcccccataatttttgtatttttagtagagatggggtttcaccatgttggccaggctggtctcgaactcctgacctcaggtgatctgcctgcctcagcctcccaaag

SEQ ID NO: 789 - DNA, 401 bp, Homo sapiens
attgttcccttctttgtccccatgtgtacttagtgtttagctcccacttattaagtgagaacatgcagtatttggttctctgttcttgcattaattcgtttagacatggcccctccagctgcatctatgttgagcaattaaaaaaggttaagatgagctaagtgaggtggtatgcatctgtagtaccagctactcaggacrctgaggcaggaggatcacttgagcccaggagttcaaagccagcctgggcaacatagtgagaccccccccatctcttttaaaaaatatttcagatgataaattttatgctgtatgtattttaccataatacaaaattggttgaagaggagtacatataaacacaacaacgaagtgtttaactcatcaatttcagatacaca

SEQ ID NO: 790 - DNA, 401 bp, Homo sapiens
aagtgtttaactcatcaatttcagatacacagtaaaagaatgtatatgagaattggtcaaggacattctgaggctttaagcttcaagtcaagaaaaacaactgcctttctgaaaacttacaccgctcacagagtctggtgggctatgaatttgatggtacaacttctaacttgacagtgtggagatcaagggtataggaawggtaaaaagctttgaaaagtttgagagtggagtttgcacagctggacacagggcaccacaaacacaggtggtgcatttgtgcctttggtggacaaagtatcacccacaatgcacaggcgcttccctggctggacaataggtctctctctccatcccctctctctctgtttcaagagaagacattttacgtaggaccttcc

SEQ ID NO: 791 - DNA, 401 bp, Homo sapiens
tcttagaattgagtccttagaagaaataccaagctaaagggcatgtgaatttctaagtttcctggcacttaattccaaattgttattccaatttctagtgtgccatactacatctttattagcattcaggattatcttcttggttaatatagtaaaatatcattttgttgtttgaattttcattgctttgataattgatgrtatttaaagatgtttaggctctttttttctttttcatttgctcagcttttctgaaaacctttaggagacaagtttctcccaaattttttctactgagatttatgcattactgatatgacttctaacatataagctagttaacatcaagaggattagtctatcacaccacttgtcacctggggcaaggtagtatccagttc

SEQ ID NO: 792 - DNA, 401 bp, Homo sapiens
cattactgatatgacttctaacatataagctagttaacatcaagaggattagtctatcacaccacttgtcacctggggcaaggtagtatccagttcattagggtaaaggtcaagtaagtgttttgtttgtttaaaggggaacacgggtaggagttatcccaaagttagaacgcaatgaaacccaactatatagtaaaatayatttggggctcaactctgttagccatcaaaggtagtacaaaacatcagaagatgaagagggttttgaaagaaagaagggccatgtcagattaagaggtagaggaacatcaagataatttttcttctattagagtttctcttttagggtttctattagagtttctctaatagggggtagagaaacagcaagataatttttt

SEQ ID NO: 793 - DNA, 401 bp, Homo sapiens
tagggtttctattagagtttctctaatagggggtagagaaacagcaagataattttttttctattagaatttctccattagagtttctcacctgcaaggtgttgactttccagttacctggcatttcattctactttttggaatggcctgagctgaaattaatcaggctctgttgatgatgcatccaccagggtttcccaktggatgcttagaaaaaattccatcacagaatatctgtgtcttgtcttcttgggggctaggagatcccccaaatttttctcttctgttcttgtttgataaaggatgtgtggaggacctggtgcttragagtttcagtttgacataaaggtactagttctggagagtctcttgggccactttatgttaacaaagactctctt

SEQ ID NO: 794 - DNA, 401 bp, Homo sapiens
tcattctactttttggaatggcctgagctgaaattaatcaggctctgttgatgatgcatccaccagggtttcccaktggatgcttagaaaaaattccatcacagaatatctgtgtcttgtcttcttgggggctaggagatcccccaaatttttctcttctgttcttgtttgataaaggatgtgtggaggacctggtgcttragagtttcagtttgacataaaggtactagttctggagagtctcttgggccactttatgttaacaaagactctcttgatcagcctttagttaagcttctctgagctctctccttgactaggcttcaaccttgggcttctgtgtcagtccttgtggagtctggttttagcaagaatcttgcaaagtcagtttagagagaata

SEQ ID NO: 795 - DNA, 401 bp, Homo sapiens
tccactgaccccacactctgctctttgactctaaatcttcatttgtccttgttgtcttcaatgtcgaggccaatctctttcccctaccataatatctctattgaaatagtcctgaacaaagtcttccttgccattttcacacgtgccagaataatgcttgcctccctgcctgcctgccttccttccttccttccttccttmcttmcttccttccttccttccttccttmtttcyttccacagaatctcgctctgtcacccaggctagagtgcagcggtataatcaaggctcacagcagcctsggccttccaggctcawgtgatcctcccagctcagcctcccgagtagctgggaccacaggcacatatcagcacgcttggctaattcttttttgccttttg

SEQ ID NO: 796 - DNA, 401 bp, Homo sapiens
ctgaccccacactctgctctttgactctaaatcttcatttgtccttgttgtcttcaatgtcgaggccaatctctttcccctaccataatatctctattgaaatagtcctgaacaaagtcttccttgccattttcacacgtgccagaataatgcttgcctccctgcctgcctgccttccttccttccttccttccttmcttmcttccttccttccttccttccttmtttcyttccacagaatctcgctctgtcacccaggctagagtgcagcggtataatcaaggctcacagcagcctsggccttccaggctcawgtgatcctcccagctcagcctcccgagtagctgggaccacaggcacatatcagcacgcttggctaattcttttttgccttttgtttg

SEQ ID NO: 797 - DNA, 401 bp, Homo sapiens
ctctaaatcttcatttgtccttgttgtcttcaatgtcgaggccaatctctttcccctaccataatatctctattgaaatagtcctgaacaaagtcttccttgccattttcacacgtgccagaataatgcttgcctccctgcctgcctgccttccttccttccttccttccttmcttmcttccttccttccttccttccttmtttcyttccacagaatctcgctctgtcacccaggctagagtgcagcggtataatcaaggctcacagcagcctsggccttccaggctcawgtgatcctcccagctcagcctcccgagtagctgggaccacaggcacatatcagcacgcttggctaattcttttttgccttttgtttgtttgtttgtttgtagagacaaagt

SEQ ID NO: 798 - DNA, 401 bp, Homo sapiens
aatcttcatttgtccttgttgtcttcaatgtcgaggccaatctctttcccctaccataatatctctattgaaatagtcctgaacaaagtcttccttgccattttcacacgtgccagaataatgcttgcctccctgcctgcctgccttccttccttccttccttccttmcttmcttccttccttccttccttccttmtttcyttccacagaatctcgctctgtcacccaggctagagtgcagcggtataatcaaggctcacagcagcctsggccttccaggctcawgtgatcctcccagctcagcctcccgagtagctgggaccacaggcacatatcagcacgcttggctaattcttttttgccttttgtttgtttgtttgtttgtagagacaaagtttcac

SEQ ID NO: 799 - DNA, 401 bp, Homo sapiens
tgaaatagtcctgaacaaagtcttccttgccattttcacacgtgccagaataatgcttgcctccctgcctgcctgccttccttccttccttccttccttmcttmcttccttccttccttccttccttmtttcyttccacagaatctcgctctgtcacccaggctagagtgcagcggtataatcaaggctcacagcagcctsggccttccaggctcawgtgatcctcccagctcagcctcccgagtagctgggaccacaggcacatatcagcacgcttggctaattcttttttgccttttgtttgtttgtttgtttgtagagacaaagtttcactatattgcccaggctggtctcaaactgctgggctcaagcaatcctcttgcttcaaggtcccaaagtac

SEQ ID NO: 800 - DNA, 401 bp, Homo sapiens
aaagtcttccttgccattttcacacgtgccagaataatgcttgcctccctgcctgcctgccttccttccttccttccttccttmcttmcttccttccttccttccttccttmtttcyttccacagaatctcgctctgtcacccaggctagagtgcagcggtataatcaaggctcacagcagcctsggccttccaggctcawgtgatcctcccagctcagcctcccgagtagctgggaccacaggcacatatcagcacgcttggctaattcttttttgccttttgtttgtttgtttgtttgtagagacaaagtttcactatattgcccaggctggtctcaaactgctgggctcaagcaatcctcttgcttcaaggtcccaaagtactgggattacaggcatg

SEQ ID NO: 801 - DNA, 401 bp, Homo sapiens
gtagctctttgaaaagactgcttgatctttcctcactctccgtgtacctaaatcttgttcaggctctgtccagaaatcaataggaaacataaaaccttgaagcattataaaatcaggcattctaaactggaaagggcctttgattatttagcccaaatgcatcacctgttttacagacgagcaacctgaagttcggagagstggaacttcctccaggtcatctgctgcactggtgatagaggcaggactaaacactctcggtgcagtgttccttctctgagtcatgttgactactatatgctcattcacagtcacaaactaaaaatctcagacaagtcaaaagcatacaattacaggaccagaagactcctcagtgattatctgggagtccaggcatccaa

SEQ ID NO: 802 - DNA, 401 bp, Homo sapiens
ttgtcttcctataaagagtttttatggcgaacagaaagctgtctggattcttgctatggttgtaggcaggagggaacatggtgtgtggcttctgaacaaactctggctgctctttaagttcaatgaagtgaaaaaaaggcaagttaattgactacagacatatgcaagagagctctcaattgagccataagatcttttggratgtgggtgtttacaaggtagctataagcactctcataagtactgcacctgtgaatcatggactttcattgtacatagctttccactgcttgcttcttgaggctactgttcagcccatcagtaatttttaaagatcctttagaaagttatatagaggaatgcaaatgtgagtaaacaaggcgcctctacctactgatggc

SEQ ID NO: 803 - DNA, 401 bp, Homo sapiens
actatgggtttcatttcatacagtcatatgaaatgaaataattatgtatacaattatatatatatacatatatatagagagagggtgtaaatatataatttattcttaatgctcaatcttatcagagctgaaagatggttacccatgaaggaatcaatgacaccatttcacatatgattgcagttaccattcccttgtagktgctgggctagctctctcagctttccgagatttttttgaggctcagaggacctcctctcctgaatgagaactgggttctaacgaatgaccctaactgtgccctgttacagtggctctgtcttatgcccacgtgaagtgatgtcacagaccatattcacgatatcgaagctacacattactaaaccttctgccgacccaca

SEQ ID NO: 804 - DNA, 401 bp, Homo sapiens
ggaaggagaagttctttcttattcaggggaaggtcgccattttgttctcttcgtgtcttcaactgactagatgagatccagttacatgaggtagggcaatctgttttagtcaatttatatttaaatgttaatctaatctaaagccaccctcacagaaacaccagaataatgcttgaccaaatgttgggtctcctcataacrtacaaagttagccatcacgatattttcctggcatacactgtgaaaccactgacctggaaccctctgacttctgtcagctatttaatagataagtctttctaatcttgagtgtttgtaaagcagttggatataaatttgaaaatttttaaatgaaacgataaatcatgtgtgacctcttgagcctattaatcctaaagtaa

SEQ ID NO: 805 - DNA, 401 bp, Homo sapiens
ctgtggttggtgatatgaagaaaaccatatgtgatagattctaaatatataaccacaaaagccaaactgacggtttggaacatctcagcaactattattgattactacagttgaagaggttgaatcagtttgcatggcaattctcctcctcttcttcctcccatacccactcctcctctttcttatttttctctcttgctytctctctctgttctccattcgttgtttctttctaattcgcagtagcagtagcagcaaccagaaaaatatttgagaactttaaactaaatggttaactaataaggcaataaatagaaggtgtgacactgaacgaggagtaaaagccaatgcattccactacattgagagacatttatgaagtatattgagttacacagaca

SEQ ID NO: 806 - DNA, 401 bp, Homo sapiens
gggctcggtggctcacgcctgtaatcccagcaccttgggaggccaaggcaggctgatcacgaggtcaggaatttgagaccagcctgaccaatatggtgaaaccccgtctctactaaaaatacaaaaattagccaggtgtggtggcacacgcctttaatcccagctactcaggaggctgaggcaggagaatcgcttgaaccygggaggcagagtttgcagtgagccaagatcatgccactgcactccagcctgggcaacagagtgagactacgtctaaaatataaaataaaataaaataaaataaagactaaaaatggcccccaaaagatatcaggttaaatccctggaacctgtgattgttccgttatatgataaaatatatgatttagttaaggatcccc

SEQ ID NO: 807 - DNA, 401 bp, Homo sapiens
gtttgatttttaggaaaagccattttattttaatttttttctatttttttatttttattttttacattgaggttctctttattttttactatttcttttttcttttcgtcttcttttttttttttttttttttgagatggagtttcactctgtcgcccaggctggagagcaatggtgctatctcagctcactgcaacatcygcttcccgggttcaagcaatttcccacctcagcctcccaagcagctgggattacaggcaactgctatcatgcccagctaatttttgtatttttgtagaaatggagtttcaccatgttggccaggctggtcttgaactccttacctcaggttatcagcccacctgggcctcccaaactgcttggattacaggcatgagcta

SEQ ID NO: 808 - DNA, 401 bp, Homo sapiens
ggaaagaattttaaagagacttgggctgagtgcagtggctcacgcctgtaatcccagcactttgggaggcccaggcaggtggatcacgggtcaggagttagagaccagcctggccaacatggtagaacctcgtctttactaaagatacaaaaaattagccaggcagggtggcaggagaatactcaggaggccgaggcaggrgaattgcttgaacccgggaggcggaggttgcagtgagccaagatcgcgccattgcactccagcctgggtgacagggcaagactaggtctcaaggaaaaaaaaaaaaaaaagagagagagagagacttgatggttttctcttgaaaaaataatctcttagccattttccactgccacgagtacatgtacattgaaattagt

SEQ ID NO: 809 - DNA, 401 bp, Homo sapiens
gtgcagtcattgaagatttgtagaccagaacataacatattgaaccccatatctatctatatgccagtgtgtgtacttacatattaatttctcctatgaaagaggaattaataggaaaagaaaagcaaggaagtaatgttcaaaacttccttaatggccaggtgcggtggctcacgcctgtaaccccagccctttgggggrctgagaggggtggatcacctgaggtcaggagttcaagaccagctgaggtcaggagttccagaccatcctggccaaactagtgaaacctcgtctctactgaaaatacaaaaattagctaggcatggtgtcaggtgcctgtaatcccaactacttgggaggctggcacaggagaatcgcttaaacctggaaagtggaggttg

SEQ ID NO: 810 - DNA, 401 bp, Homo sapiens
ccactgtctctgctttcttttatggctaacaagcctatactaccacaagccacatttcatttgatagcatgggtagtggaagagagcatccaaagccagtcaatcctaaatcatgtctgcaaaaatatctgtaaggataaggcctggtggacctcaagaactgtctccctctagtaataatcatataacattattattttkcagtgaaaaattatccagtacacaagcagtctatgcaatgtaatgagaagaatgctttgcaactgtactactagaagcgaactaattcatgatttatttttaagtgattagaacccttagtttatctgtgagaacatcacttaaataaaatgttttaaaatatgcaatgcatatgcaatagcattaaagtattaaatagc

SEQ ID NO: 811 - DNA, 401 bp, Homo sapiens
agtattaaatagcatcttaaagagcaaaagaaactattaagaataattaagtggatttattggctaattggtgtttccacatgtagttatttctgcaattattattcatttgctgatttacatagagctattctctaaaattactctggcattaaatgaagttagaagacatctccagtttggaaaatctattaagcaaakccttttcaacttaaagttgaggtgatactgaatcaaggcctggcagaactgactayagactcagagggagtatgtttattgcttttaattcttcctatttctgtttgaactaacatggcaaaggctttcatmttccaaactacacttatccagtctataaaacaaagatgatattgtttcaactataaagcacagattaa

SEQ ID NO: 812 - DNA, 401 bp, Homo sapiens
ttattggctaattggtgtttccacatgtagttatttctgcaattattattcatttgctgatttacatagagctattctctaaaattactctggcattaaatgaagttagaagacatctccagtttggaaaatctattaagcaaakccttttcaacttaaagttgaggtgatactgaatcaaggcctggcagaactgactayagactcagagggagtatgtttattgcttttaattcttcctatttctgtttgaactaacatggcaaaggctttcatmttccaaactacacttatccagtctataaaacaaagatgatattgtttcaactataaagcacagattaactttgggaggctgaggcaggcagatcaccagaggtcgggagttcgagactagcttg

SEQ ID NO: 813 - DNA, 401 bp, Homo sapiens
ctctaaaattactctggcattaaatgaagttagaagacatctccagtttggaaaatctattaagcaaakccttttcaacttaaagttgaggtgatactgaatcaaggcctggcagaactgactayagactcagagggagtatgtttattgcttttaattcttcctatttctgtttgaactaacatggcaaaggctttcatmttccaaactacacttatccagtctataaaacaaagatgatattgtttcaactataaagcacagattaactttgggaggctgaggcaggcagatcaccagaggtcgggagttcgagactagcttgaccaacatggaggagccccgtctttactaaaaatacaaaataaccgtgtgtggcggtgaatgcctgtaatcctagc

SEQ ID NO: 814 - DNA, 401 bp, Homo sapiens
ttgatacctatggaggaatacattctaaaaataagattttatatctgtttgcatgttaacaaaacttatttgtaaagacacacattctagaaagtaacctcaaaagtactcttataaagcacctcattttgaaagtcaagtagagcaattcctgggcagatgataatgatactgcagagacatgtgaagaaggaaaaaaartaataatttcgctccctgtgttagtctgttctcatgctgctaatgaagacatacccaagactgggcaatttataaagcaaaagagatttaatggactcacagttccacatggctggggaggcctcacaattatggtagaaagcaaaggaggcgcaaaggcacatcttacatagaggcagtcaagagggcatgtgcagagg

SEQ ID NO: 815 - DNA, 401 bp, Homo sapiens
caaaggaggcgcaaaggcacatcttacatagaggcagtcaagagggcatgtgcagaggaactgccctttatcaaaccaccagatctcgtgatacttattcactatcacgagaacaggatgggaaaaacccactgccatgattgaattcccttccactgggtccctcctgtgacacgtgtggattatgggagctggaattasagatgagatttgggtggggaaacagccaaaccatatcactccctaagactattacatttcagcagttagatgaagagagaaggacagggttcagattgaatcattttggatggaggagaacatataaataattgaacaataggagcaccacctagtttagagacaacctaccacaggcaaatacctcacatgacttcatt

SEQ ID NO: 816 - DNA, 401 bp, Homo sapiens
gaagatacttctacagtatcccacagttccacaatctctgattcaggaaattacattaaaagttatatgttggcattttggaatttcatttggtatacatacctgcagacagaggcaataaaatcacatcaatggtcggttacaaatgaagtcatccagttgacccagggtatgctttggctaaattttgttttagatttkccctaaaatataattgcaatattgaatatctctaatagatctcaagggccctctattagtccattttcrtgctgctgataaagacatacccaagactggacaatttacaaaagaaagaggtttattggagttacagttccacayggctggggaggcctcacaatcatggtgaaagtcaaggaggagcaaatcacatctta

SEQ ID NO: 817 - DNA, 401 bp, Homo sapiens
ttggcattttggaatttcatttggtatacatacctgcagacagaggcaataaaatcacatcaatggtcggttacaaatgaagtcatccagttgacccagggtatgctttggctaaattttgttttagatttkccctaaaatataattgcaatattgaatatctctaatagatctcaagggccctctattagtccattttcrtgctgctgataaagacatacccaagactggacaatttacaaaagaaagaggtttattggagttacagttccacayggctggggaggcctcacaatcatggtgaaagtcaaggaggagcaaatcacatcttaggtggatggcagcaggcaaaaagagagcttgtgcagagaaacctccattttgaaaaccatcagatctcg

SEQ ID NO: 818 - DNA, 401 bp, Homo sapiens
aatgaagtcatccagttgacccagggtatgctttggctaaattttgttttagatttkccctaaaatataattgcaatattgaatatctctaatagatctcaagggccctctattagtccattttcrtgctgctgataaagacatacccaagactggacaatttacaaaagaaagaggtttattggagttacagttccacayggctggggaggcctcacaatcatggtgaaagtcaaggaggagcaaatcacatcttaggtggatggcagcaggcaaaaagagagcttgtgcagagaaacctccattttgaaaaccatcagatctcgtgagactcattcgctatcatgagaacagtgcaggaaagaccggcctgcataattccatcagctcccacgggttcc

SEQ ID NO: 819 - DNA, 401 bp, Homo sapiens
accatatgccaatttttttctttgactattgactcactattttataatgcatccttctggcaataatgaaataaaaattagtaaacagaagtaactgtttaatgaaaatgaagtatttgtatttctatttatcaagaaagaaaagacgaacctgtggcatgcagagagtagtctgaatgctattgccacagtggttttatwtttattgtgtgatgtaaccatatgccaatttttttctttgactattgactcactattttataatgcatccttctggcaataatgaaataaaaattagtaaacagaagtaactgtttaatgaaaatgaagtatttgtatttctatttatcaagaaagaaaagacgaacctgtggccgagcacgggggctcacgcctgtaat

SEQ ID NO: 820 - DNA, 401 bp, Homo sapiens
ataaaaattagtaaacagaagtaactgtttaatgaaaatgaagtatttgtatttctatttatcaagaaagaaaagacgaacctgtggccgagcacgggggctcacgcctgtaatcctagcactttcggaggccgaggagggcggatcacctgaggtcaggagttcgagaccagcctggccaacgtggtaaagccctgtctytgctaaaaatacaaaaattagccgggcgtggtggctgatgcctgtaatcccagctactcagaaggctgaggcaggagaatcacttgaacccgggaggcagaacttgcagtgagccagattgcaccattgcactccagcttggggcagaaagaagagaaactcagtytccaaaaaaaaaaaaaaaaaaaaaaagagaaaag

SEQ ID NO: 821 - DNA, 401 bp, Homo sapiens
agaccagcctggccaacgtggtaaagccctgtctytgctaaaaatacaaaaattagccgggcgtggtggctgatgcctgtaatcccagctactcagaaggctgaggcaggagaatcacttgaacccgggaggcagaacttgcagtgagccagattgcaccattgcactccagcttggggcagaaagaagagaaactcagtytccaaaaaaaaaaaaaaaaaaaaaaagagaaaagaaagaaaagaaaagatgaacatgtaacttacacaaaacacttgttgccatttaccatggggatataatgaactaacattcagaagtcacacatatgctgaagaagcatcaggatctacttcaaaagttaaaaacattaaaaaaaaacacagaaaaaaagagtgcat

SEQ ID NO: 822 - DNA, 401 bp, Homo sapiens
tttgggaggctgaagcaggcagatcacttaaggacaggagttcaagaccagcctggccaacaggagaaaccccgtctctactaaaaatacaaaaattagctggtcatggtagcccacacctgtaatcctagctactagagaggctgagaatctcttgaacccaggaggcggaggttacagtgagccaagaacatgccactrcactccagcctgggcgacagagagagactctgtctccaataaatacataaaaataaaaataaaaatttaaatattattgattaaagataagaatgaattagttttgtcactaatttcatacatattaaccatatcatgccactttgaagaagattgtaggtaatttatgaaaaatgttcaaataagactgtattttttta

SEQ ID NO: 823 - DNA, 401 bp, Homo sapiens
ggacaagctttatagtcctagcacttgctgattctttaaatactgtgctttggtccaggggatgttaccttaagcccattttttgtagttagtaaataagacttcttcccaaagtcacgtgcatgttcaagttcttgcattgccagtgtgtaatggataaagacaaatgtatagtaaaaaaatcatgaggcagtctttggktctcatcccagccctgttggctgtgtgatatttggcaaattattttacttctctgagcctcttttctttccattgtaaaatacagagaatgatagttaagagtatttttgtggaaatgaaccaacacaatgcagctcaagtatcttagcagagtgcctgtgttcaataaatattaataaaatgacccttaactcccctca

SEQ ID NO: 824 - DNA, 401 bp, Homo sapiens
ggaaatgaaccaacacaatgcagctcaagtatcttagcagagtgcctgtgttcaataaatattaataaaatgacccttaactcccctcagcaagtttaaaaacaggaagtttccatttcaccatttactttccaattctttgttaaagatggccataataagtaatgagagtgtgcatttgtaaatgtctgtcaccaatgkgaatttacttgagatgactcaaaccacattctatactggaaaaggtgcatttaacgggcaaaagaaaagcccaggccagtttctttctgtatcaaccctgggtaaatctccttaagaaaaaattaacaatcatgatttattcatagggaaagaatttaactacttgttagcattcgaatgggtcctaaggaaactcccaa

SEQ ID NO: 825 - DNA, 401 bp, Homo sapiens
ttttccgatgaagtttttttgctggtccaaatattaattaatcgattgattgaaaatgctacaaaagaggagccattcatcaaagaaccaaatccagtgattcgtgatctggggttttatcacttatatttctagagcatccttttgcttttacaacttaaatttaattgaaattttaatccctagcaggtttttaataaygggcagcttttgagacattaaaaaacattgctctcacttcccagataaggaggttgtccagatatccttatgctttagggagcatttactaagtgatggtacttcccagcgcacatttttggttttgttaaagtatcttaaaccgcccatgtgtagtcaacttccccttatggaatccattgataaatcatggcaaaagg

SEQ ID NO: 826 - DNA, 401 bp, Homo sapiens
caaatcaaaagactagatgtagctaattagacatgggaaaagggtggttctcctgaaaatctggggcctcaggcattttctggaatgtgtacagtcagaacgtgcaagttagtcagcaaagagaaaacaagcagccacacctctcccaaataccgaatagtcatccttcttttgtggttcagaggtgtttgtttgtcttakaatgctgcaacttaaaaccaattgattttaaataaaaatggtaacattataaagtgtgaaagtgtggggttaggaatcatttcccaccctgtgaaaatggctctatggtcacccaggggtgtgtgtgtgtgtgtgtgtgtgtgtgtgtgtgtttgtgtgtttaacctgtgagataagaatggtcaaccagttgactcctc

SEQ ID NO: 827 - DNA, 401 bp, Homo sapiens
actgattgttgtctccaaaacatgttctatcttagacactatctcatcctcttctctgccagatattgattattcatacattctctgatcccaaccaccagctttactcattgttatgtctttgtagctttttcttcccttaaatacaaggacaacctattatttccacaattcagcactttttactgggtcttttacctstctaaacccaacaagagcatcaaagcatgatgttgggcttggtgcctctcttccaccattctttctctttttaactccacatgtgtgctggactcttgcttatgatcttccctgtgtagctaccaccacaaaaatgtgtccccggcctttacaaatgaagtgttcagatgcaagccattctcttatagacatggcagtaa

SEQ ID NO: 828 - DNA, 401 bp, Homo sapiens
atagcccttaattaccagagacttggaactggaggctacactggacctgatatatacacttaacaaagtaacgcttatgtgcctgtggttttacacccccccaccccaaatatctcctagtgactcccctagaaaatgtactgccctggccagattttctttttgctgtcatttcttctcaaatgtattatcattcattgwctaaaaaatataaaagccccttcttcagacttcactgtcttgtgaagatcttcatgtacacgtgaaattaatcaaatgtgtatacttttctcttgttaatctgcctggtgtcgatttggtttctaggtcctgctgaggagcccactaagagctaaaaggaggattgggggtgatcactggctctcctacagttatgccct

SEQ ID NO: 829 - DNA, 401 bp, Homo sapiens
cagagaactacacttgctaagttcagaatactttatcagcttactttgtgtccttgttcccatggtggtgacaccgatcttgaagcttaaaaaatcccccaaattccgcctcccacctctgtgacactcttttgcaaaaatatgcaatttttctacacacatttctgacaaaaaggaaaaaaatgttaagtccaccctagktctgtccagacaagcacagagagaggcgtgttagatttccagacaaatattttcgcctagattttgctcaatgaacttgattcactgcagggctttttttcccacaagcgcgtggcagaggtgggctgccacaggagtggccagtgcccgctctctgcagggcactgctatgaatcaccattttcatgaatggaaagaat

SEQ ID NO: 830 - DNA, 401 bp, Homo sapiens
cattcagtgagaatgcaggagaagtctaagaattagaaggaacaaagaaaagagaatgagcacgggaataaaagtaaataataatcatgtctattcttgattctggggactggctaacttctgtcactttaaaccacttcacctcatttgaaagtccaggcttctcagcttgatgtccaaggttctccatgacacatatcytcttgagcacttcacttcatgccccgaccaagcttggacttcttccccctcacatgcttgctgtttcatgtttcatgttttagctcatgctgttccctctacctggaacatcttggttcactcaactaattctacccatcagaatttagcacaggtgtcctcctctcttcatggtcttcctaaatacctcttgggttcat

SEQ ID NO: 831 - DNA, 401 bp, Homo sapiens
caactacttcctaaagttgaaattgcttccgatttcttttttctctatttcatggataatccatgcagtgtttgctcaacctgtttacactgagatgtgttgaggaactgtcccacggcaagaccacaaggtggggcagtaatgagtaattggaagaaaactgcggtaccttctaaagctcaaatgtggctttctagaacmcgatgaagtggagccctacattcattatttgaccttggttgttttttttttttttttttttttttgagacagaggagtctcactgtctcccagactggagtgcaatggcatgatctcggctcactgcatcctccgcctcctgggctcaagcgattctccagcctcagcctcctgagtagctgggactacaggcgcaagcc

SEQ ID NO: 832 - DNA, 401 bp, Homo sapiens
ccatccttcctgtttgccttccttccttccttttggattatgttgtttcattaaaatatatttagctgggcatagtggctcacacctgtaatcccagcactctgggaggcagaggtgggcagttcacttaaggtcaggagtttaagaccagcctggccaccatggtgaaaccctgtctctactaaaaatacaaaattagcygcgtgtggtggtggacgcctgtaatcccagctactcgggaggctgaggcaggagaattgcttgaacccaaaaaaagcagaggtttcagtgagctgagatcgtaccactgcactccagcctgggcaacagagtgagattccgtcatatatatattcacatgatttaggaaattctgtatttcagcatcacagtataaagac

SEQ ID NO: 833 - DNA, 401 bp, Homo sapiens
gctgaggcaggagaattgcttgaacccaaaaaaagcagaggtttcagtgagctgagatcgtaccactgcactccagcctgggcaacagagtgagattccgtcatatatatattcacatgatttaggaaattctgtatttcagcatcacagtataaagacttaagttctaagagttgatattgctgtagatgttgggaatgraatcttaggagtaacctttaccggaggcaacttctactgcccttgctacctttggtgtgacctgaaaccccctttcttcattagtaccaagtgacttgtttgccactactcagctgtcccagaatagcttgactccacacatccatgcatttctaggaagaaattaggtgcattataaataacgagtcctctgaaaatgc

SEQ ID NO: 834 - DNA, 401 bp, Homo sapiens
aagtatgagcttgggccttgtctgacaataaaaaggaaatgctaggtcccagggaccacttcaagatgtgcttgttcctttaaagcagggagttgtcacatccaatttttaacacatatgtatattttaacacatatgcatattttaacacacatatatatttctgattatactgtaaaactggtaaattatttttaaaamatcataaggcccccaaatcccagagaaagttgtttctattacaattttagtctatttgtctcttttaagtttctcttccctctgagcatatgtatctctaatgcatgtctgcttatgtaggcatatttatacatacaccctttcttttacaaaactgatatcaatttttgtattttaaataaaatacaaatgttttacat

SEQ ID NO: 835 - DNA, 401 bp, Homo sapiens
ggctccagcaataagcctaatgacctctacaaagctgttctgtaatacagaagtaaacacttactctgcacaatttctccttgcatgtgcttcccactggtagaacattattcatcttgttggtctttccaaagagattcattacttccttgctccttcttattcatccttcataatagaaatgctaaaagtctgaaagaygaggaagggagcacatttcctccctgcagtctgaggaatggctgtatctcttcatgagcaccaagaggaagcccccagatgggtccctgtccttacagccttgtttccatgtgcatttccaccccagcctcttccataatcgctccccatctctatgccccagcgatgccagttgttccatcaaacactgtcctctctgt

SEQ ID NO: 836 - DNA, 401 bp, Homo sapiens
acaccttcatcacttgaggcccagataggagtgactgtgcgatgtaaaaaaggcttgccaacaccactgatgtttgacgtgaaggtgaaaagttcagtggcccagagaagtgctttaaagggttcttcttaaatctaacacctgaaggaacaccttcagattatccagcagttgtgatcccctatgcagtgtctatttgtmtagacttcttccccaacacacattccctagtacatttaaatggaaagaaaggtctgggaggttatttgcaggggtgttgatggaaacaggacccatcacagctagggtcatgttatcagagtgcagattttgaattcctttctgcctttcctgcatgactttaagtaagaaaatggtcaccttaaatttgcccaataaga

SEQ ID NO: 837 - DNA, 401 bp, Homo sapiens
acaggacccatcacagctagggtcatgttatcagagtgcagattttgaattcctttctgcctttcctgcatgactttaagtaagaaaatggtcaccttaaatttgcccaataagactcagcttggaaatcattcttgggatgcagaaggatctggtccagaaagcttcagagaagccttgagaactgcctattcaagaggrgaagaaggctgagagagggaacctgcaaagatctagcaggaaaagagtcttctatgtgcaaacaacactagaccctttcccagaattggggcactaacaaaagataatgcctctgaaatattgggaaaattgttggagaatatgatctcgttccctatgctgtcactccaggtaacacccatgatgctcaaaggattttt

SEQ ID NO: 838 - DNA, 401 bp, Homo sapiens
actttatttaacaggtagaaaattatggaaattattataccaagaaaggacataggctaataacataaattaggcttaaggagagtttcataaattatgtatctccaatggattaatgaaggaaattaggaataatttttatattatctctacttttttacttatatatttggacttgaggttttctgcatataatatgcrcactaatataaatattaatataatgctaatacaaaggaatactctctcagagattgtgcattaatgtatgtttcagtgacaaaatatagtgcgtgaccttagccccaggaggaagaataggatatgtgaaagaacctaagattttgracccaggataacctggttttaagcccaggtctgctacttaagagctgtacgac

SEQ ID NO: 839 - DNA, 401 bp, Homo sapiens
ctctacttttttacttatatatttggacttgaggttttctgcatataatatgcrcactaatataaatattaatataatgctaatacaaaggaatactctctcagagattgtgcattaatgtatgtttcagtgacaaaatatagtgcgtgaccttagccccaggaggaagaataggatatgtgaaagaacctaagattttgracccaggataacctggttttaagcccaggtctgctacttaagagctgtacgactgtgagcaagttattttaaattgctggatcttgttttcctcatttacaaaatagaaacactgatatctgcatcatacatcatactattgttatgatttttaaattaaaaatatatgccaatgaacctagcaattggtgaccatattg

SEQ ID NO: 840 - DNA, 401 bp, Homo sapiens
gccacccattaatcctatatattggttctaggacttattcctggagttatatcctgcacattggcttcaggcatgaaggacttgatcccacatcttctccagtgggattgtggagatcgtgtcactgctggcctgtcctgcaggctcttgtggtgatcattataaaagccagccctggggtagctcaggacaggaaaggarggatattctgaaatgattttctccttttagttaacacattttggttccagaacactgagcaaatcatcaactgaagccccatgatatattttcaaagagtgaatttctcttacctgactgaggcattttattctataatagcaattctctgggttttttttttttttcatacttataacaaagcggattaatatatactc

SEQ ID NO: 841 - DNA, 401 bp, Homo sapiens
tctgaaatgattttctccttttagttaacacattttggttccagaacactgagcaaatcatcaactgaagccccatgatatattttcaaagagtgaatttctcttacctgactgaggcattttattctataatagcaattctctgggttttttttttttttcatacttataacaaagcggattaatatatactcacctaaracaccaaagatactgatggctttcaccactctatctaagcaggagtaaacacctgggaactagaaatctgagaaagaggacaacacccaacaccacctaactatggccctcgatacagtcatttaacttaataaccttccgtgagagtaaggtcattatgaaatatgctcggttttacacaaagctttaaaaaaagccac

SEQ ID NO: 842 - DNA, 401 bp, Homo sapiens
tgtttttaaagagctttggatacctgctgtggttaatgtgtcactcactgcgaagctttccaaggcaattattttgatcagaatgtcactcagagttagtaggctggcttcatgaatcatttggggagggtagtataattcaaatttgttatgtattgtcaaacatttaaaaagaataatagtataaaacaaaatacttgyttttacactaaaatttaacatcttttttttttttttctgggaaaatagaatgttgcctaaactgaagtccaaacaactttactttttaccttttcaaatatccatgtggcatcaagccaggccatttaaaatgacatccagttatttaattttaaattcattttgtagaaatcccacctctctggggagtatgtacagca

SEQ ID NO: 843 - DNA, 401 bp, Homo sapiens
gaaagtgctcaaaaatatttgttgagtgaatgacagtagagaaaataaaaatgtcctggattggaatcatgaaaactgtctacttatctctaatattaaaaagctcagtgtaatcttagaaaaaataatctgagagctctgacactttccagaggccacttccacgggaaaggaggagcaaagtctctgatcagaagttgrgtaaatatcctctgaggtccctgattatccagacattgacaaaagaaaggctctccaaggtttgccattattactataaggaagtcccagctcagatgattcatagttaaatatttgcatctcctctggctaagaaaaataaaagccacgacattccagagcctttaggcatgtaagatcttggtactttcccagttatt

SEQ ID NO: 844 - DNA, 401 bp, Homo sapiens
acacacctaccctcactctccacccacccacacacacacacactggaaattgtatcatacacacaccggaaattgtacccaaaggacgctattactaactatgaagcaagtggcacccatggcttgtccagagaagacacccacagggtcagacttcacacaacaagcctatgaatgggatagcccacatttaggagtggwcttctaatccagaatcttctctttatttagttcaagataacataaacttcctttttgtaaatttgtccatcatccactcccttgctcttatactctagtgagggggaggtcagatgataaatgacaaggaagatcatttccagccgtgatgagtgagatgcggaaaacagggcagccatggagcagcgagagaacaacca

SEQ ID NO: 845 - DNA, 401 bp, Homo sapiens
ttgttacatctggctttaagtctccaatgagccctggggaactcaatcccatcaaaggaatttcgagaggagttcacagctcctatctaccatagaagggagaaacaggataaggaatagatccctgataaagcacatgaacaaattaaatccattgttaatttgagtgactggcatagagaggtggcccctacaaaattstcactttttagagtcacggtggttcacagaagaatagaaatcatcttttcctcttaacattatttccatgtactacagttccctctccctaaagtggtctacttgcatttgtcaacactgaaagcaaaaacaaagttgaatatacacccatggtgcatattgttaataaagaagatggaggcaattcagtggtattctaa

SEQ ID NO: 846 - DNA, 401 bp, Homo sapiens
acacatgtaaaaaataaaaaataaaacaatatgcatgtatgcatacatacacacacacacttttagctctgtcttgagctgtcatctcctggggcaggcttaatgacaggtgcaattctggcctaattcaacctcttgaaattgaaaagggttagcaccactcagtggctgctaaatcctagagggcaaaacagcctcctrtgtctcatcccttcatgactgtctcatgggagctcgatttctgtctctttccacctgctaaccagattcgattttgatgctgtaccattggtagtaaaatatacttctttctggtaaaaggagacctgagaaagtagaaatggcattatttaaaggaatttatacataccatataagttggctggatggaccagccaaca

SEQ ID NO: 847 - DNA, 401 bp, Homo sapiens
attttttatgtcatcccctggttctacagaagactgtaaggacagaggaatgaggcatttcgccttgggatcttcagactcagatttctgagtcaggtttgaggttcctgctgtcctgtgggcagtgaggcccagggattacaccaaaggagcaggaacccaatgtcacaggtcccctaactcctgcctagttgcccaggycacataggmacaggcaggggagctggctgatctcatttgtttgttttccgtgtccgttctcaggcagtgataggcatgctatcatctcaattcttaaataaaaccaagttgtatcgttgaagagcagataaagcaaagacagaagcattttaaaaggaattttgtggcttccaaagtacaagtatagagtatttctgagt

SEQ ID NO: 848 - DNA, 401 bp, Homo sapiens
gtcatcccctggttctacagaagactgtaaggacagaggaatgaggcatttcgccttgggatcttcagactcagatttctgagtcaggtttgaggttcctgctgtcctgtgggcagtgaggcccagggattacaccaaaggagcaggaacccaatgtcacaggtcccctaactcctgcctagttgcccaggycacataggmacaggcaggggagctggctgatctcatttgtttgttttccgtgtccgttctcaggcagtgataggcatgctatcatctcaattcttaaataaaaccaagttgtatcgttgaagagcagataaagcaaagacagaagcattttaaaaggaattttgtggcttccaaagtacaagtatagagtatttctgagttaatgaaga

SEQ ID NO: 849 - DNA, 401 bp, Homo sapiens
atatttaattttctaattatgtgcgaaccttggagtcaggattagttgatatttttacaccttcaaatttataaacctagtatgaagtcccatctagactaacaaatgttttataatagaaatttaaatagtactccagttttgtttatgcatttgctgatggtctttcttgctatgaactttagaaactttaaatgtccrtttactcacaatacacacacagcctcaatgacctaataagcagatttgcagagccataaccttgctggcttatgtcagctcgaagtaaarggggaggtggtagtggtgaatctgtttttattactcagtgtttaatcataatgaatcagaggcttttatgagaaaccttctacatcccatgaaagatttgctgatcaaag

SEQ ID NO: 850 - DNA, 401 bp, Homo sapiens
catctagactaacaaatgttttataatagaaatttaaatagtactccagttttgtttatgcatttgctgatggtctttcttgctatgaactttagaaactttaaatgtccrtttactcacaatacacacacagcctcaatgacctaataagcagatttgcagagccataaccttgctggcttatgtcagctcgaagtaaarggggaggtggtagtggtgaatctgtttttattactcagtgtttaatcataatgaatcagaggcttttatgagaaaccttctacatcccatgaaagatttgctgatcaaagatgtagagatttctgttttattagaaaaaattgtttagcacctcattgtggatacagaagacattgtttgttgaaaagtttaagtctttt

SEQ ID NO: 851 - DNA, 401 bp, Homo sapiens
catttagtttgttagatatttaaatctactagacaatctattatgtattctgctcagaaatggttaagacctactgatctagaagacggatctctctgagccataatttctgctcaaggcttgctaggggagatccttctaacttggctttatacacaagaagctagctcacaaaaatgtcggtattctagtagctatgcstttcattgaccagacctgagatttggcctctccatcacttcctctgcaggtgatgtagacatcatttctgctgacatctatgttgatgcagttctagagtcatctgtgtccctattatcctgaaaatgaaaattgatagcaaaggcagataatgtccatttagttctgggtgtaaatgtcttccttgctcttccattgtg

SEQ ID NO: 852 - DNA, 401 bp, Homo sapiens
ggttcatgccattctcctgcctcagcctcccaagcagctgggactacaggctcctgccaccacgcctggctacttttttatatttttagtagagatggggtttcaccatgttagcccagatggtctcgatctcctgacctcgtgatccgcccgcctcagccttctaaagtgctgggattacgggcatgagccaccgtgccyggccaagcatttatcttttctttgtgtcagcaacattataattcttttcttctagctaattagaaatatgtaataagttattgttaactataatttccccactataatatcaaatactgtaagttattccttatatctaactctatttttgtacccattaaccaactgttatttacccctgctcytctccttcccagcat

SEQ ID NO: 853 - DNA, 401 bp, Homo sapiens
atgagccaccgtgccyggccaagcatttatcttttctttgtgtcagcaacattataattcttttcttctagctaattagaaatatgtaataagttattgttaactataatttccccactataatatcaaatactgtaagttattccttatatctaactctatttttgtacccattaaccaactgttatttacccctgctcytctccttcccagcatctgataaccatgatttcacgctctatggagatccttgctttgatgataaattcattaaggacaagaaccctgcagggtgttcaatatgcttcccaggtgccaaatagtctcaatacatattaacagaaagtcagtgtcaactcacctgcacctcacacagtaaattgatttaggcatctcagatt

SEQ ID NO: 854 - DNA, 401 bp, Homo sapiens
agccgtgttgttgcttttccatggacttggaaaacatgaagttgtgtagccgtgtgtctccagacttttaacagcccagaaatggtttcaatgttctgcattaaataaatcgagaagggttagacaaaacagtgtctgaaagatttcatgctgtgagggtgatgagggtgatgggtgacattaatgaatctgaaatggtcrtgactacaaacttgtttttaaaatgtcactttctctaagagaacaaaaacttgaaactcaatgttcatgaatacaagaaggccttttcaaagaaaggccacgggcactctcactaatacacacttggcatttgggtatatccctaagctgtggactgtgtttacatatattactctttcttctcatcactctttaaccaa

SEQ ID NO: 855 - DNA, 401 bp, Homo sapiens
cccatagtcctctatctttaaggaaaatcatggcacttgtttttgaatttttttaatccatcttccagattccaaaactaggaattccaaatgttgtttggacagactgaaaagagaacaaccaataggagaagtggtacactatgagtagtcaaggtaccatacacatgggaagtgtgaaggagacttacttagtatttwcttatgtctctttgccaatatttgggagtttcacagagcatttctagataatgagggatggaagtgaagagtaggacaaggtattcaaagatctaagaagaatgagaaatcctcgatttcccatatgacaggatgacttggttacacgagtaaaytgctttttgtatgtgaaacaggcagcaattggaggtagcaaagga

SEQ ID NO: 856 - DNA, 401 bp, Homo sapiens
ggtaccatacacatgggaagtgtgaaggagacttacttagtatttwcttatgtctctttgccaatatttgggagtttcacagagcatttctagataatgagggatggaagtgaagagtaggacaaggtattcaaagatctaagaagaatgagaaatcctcgatttcccatatgacaggatgacttggttacacgagtaaaytgctttttgtatgtgaaacaggcagcaattggaggtagcaaaggaatacacaggtaagccctggagtccaattcccaaaattagtggtgttttctgattccctaactgactctatggtaggctcctggtcaaaagatccatcagggctgctgggcccatgctgacattccatatagccatcttctttctgattctctgtc

SEQ ID NO: 857 - DNA, 401 bp, Homo sapiens
ttaaagagttttgttctccggtatcaggagttggccacaaatgctttctctataagttcataattcctgttgggaaacttggaaaagagctctccccttctcatccaaagaagtgatgacttctctttgttagtttacaactaacaaagtcccatttctggtttgaaagtcagatggaccttggcttatatttatttaacraagacgtggaatttctctaacagactgaaagtttattagaataacatctagcattaggcctggcaaataggaggtcctcgttaagagatctgatcagatttgacttctaatcccagatataaggtgtttattctttttgagccactatttcctcatctataaaataagaaatattcataactattccataatatgtattc

SEQ ID NO: 858 - DNA, 401 bp, Homo sapiens
ggattatctaccatgtcttccagcttcaatctctataattgtataaatctggttggcaatggactctttagtgcaaagtcctaaagccttcaagacccaaacttttctcactgggcaagcaatttgcgggaaattaaacaagtccaaaatattgaacaaatgaagaaaggggccattttaacagacaggaatacttcataytgtaaagatggccaggtgtagtggttcacacctgtactcccagcactttgggaagttgaggcaggaggattgcttgaggctaggagtttgagaccagcctgagcaatacagggagacctcatctttgctagaactttaacaattagctgggcatggtggcatgcacctgtagtcccagytatgccagaagagaagggagg

SEQ ID NO: 859 - DNA, 401 bp, Homo sapiens
aacagacaggaatacttcataytgtaaagatggccaggtgtagtggttcacacctgtactcccagcactttgggaagttgaggcaggaggattgcttgaggctaggagtttgagaccagcctgagcaatacagggagacctcatctttgctagaactttaacaattagctgggcatggtggcatgcacctgtagtcccagytatgccagaagagaagggaggattgcttgagcacaggagtttgcaactgcagtgagctatgatcttgcaactgtgctccatcttgggtgacagaatgggaccttgtctcaattttttaaaatatatatatacatatatatatatatakagagagagagagactatatatatgtgtgtgtgtatatatatatatabagaga

SEQ ID NO: 860 - DNA, 401 bp, Homo sapiens
gctagaactttaacaattagctgggcatggtggcatgcacctgtagtcccagytatgccagaagagaagggaggattgcttgagcacaggagtttgcaactgcagtgagctatgatcttgcaactgtgctccatcttgggtgacagaatgggaccttgtctcaattttttaaaatatatatatacatatatatatatatakagagagagagagactatatatatgtgtgtgtgtatatatatatatabagagagagagagacagagagagagtaaagatctcatttcctccacaaatgttaaaaacattattctgattttaaaaaaagaatgaatttttaaaatttacaaatttctgaaatggacaaaaatatcctaggccttcttcctcaaaaaataata

SEQ ID NO: 861 - DNA, 401 bp, Homo sapiens
cccagytatgccagaagagaagggaggattgcttgagcacaggagtttgcaactgcagtgagctatgatcttgcaactgtgctccatcttgggtgacagaatgggaccttgtctcaattttttaaaatatatatatacatatatatatatatakagagagagagagactatatatatgtgtgtgtgtatatatatatatabagagagagagagacagagagagagtaaagatctcatttcctccacaaatgttaaaaacattattctgattttaaaaaaagaatgaatttttaaaatttacaaatttctgaaatggacaaaaatatcctaggccttcttcctcaaaaaataataaataagaataataagaaattgcactggtatctgaaaaagcaacttaa

SEQ ID NO: 862 - DNA, 401 bp, Homo sapiens
atttaaataatttaaaatcttaaaataatgattatatgtataataaaactgtaaatttacaattatagagctataaacaattttatagttgtaatattttgtaactaatgaaacattatattttaatgattttattattgttgtaattaatataaagaagataaagaaaaatgggcaaggtttgaataagcacactttgtygaagatatatggatagccaaaaagcatataaaatatgaccaaaagcctctggtgtttagagaaatgcaaattaaagctaaaatgagattcttctaaatacctatcagaatgtctgagattaaaatgactgactgtagcaactagtggcaggaatgtggaggaactgaagttctcatacactgctggcagaaatgtacgat

SEQ ID NO: 863 - DNA, 401 bp, Homo sapiens
aaaatgactgactgtagcaactagtggcaggaatgtggaggaactgaagttctcatacactgctggcagaaatgtacgatgacacaacccttttgaaaaacattttggcagcttcttaacaatttaaatgtacatatcccatgtaagccagccagtccactcctgggtatttactcaagagaaatgaaagcctatgtccayacaaagacttgtatgtaaatatttataacagctttatctgtaacagctaaaagttggaaaccacccaaatgtctatcagcaggtgagcggataaacaaattgcggcatatacagtgtagatagtggaatactactcagtaataaaaaggaatgaacaattgacacatgctacaacatggatgatgcaaaataattacact

SEQ ID NO: 864 - DNA, 401 bp, Homo sapiens
atttttctctgttattctctactgagaggggatgaggaggattaccaaggggcaaggaggaccttttggaggtgatagatgtgtttattactgggattgtgttgatggcttaccaggtatctatgtaagtcacaactcatcatatggtatactgtaaatatgtgcaggctgggcgtggtggctcatgcctgtaataccagyactctggaaggccgaggtgggagaattaaggccaggagtttgagacatagcaagatcytgtctctagtaaataaataaataaataaataaataaataaataaataaatgcacttttttgtatattgagttatatctcaatgaagctgcttttttttaaaaaaaaaaaaaacatataacataaaagagattaacagaagag

SEQ ID NO: 865 - DNA, 401 bp, Homo sapiens
ggaccttttggaggtgatagatgtgtttattactgggattgtgttgatggcttaccaggtatctatgtaagtcacaactcatcatatggtatactgtaaatatgtgcaggctgggcgtggtggctcatgcctgtaataccagyactctggaaggccgaggtgggagaattaaggccaggagtttgagacatagcaagatcytgtctctagtaaataaataaataaataaataaataaataaataaataaatgcacttttttgtatattgagttatatctcaatgaagctgcttttttttaaaaaaaaaaaaaacatataacataaaagagattaacagaagagattcaaaagtctagaacaccaaatattaaaggtagcttttcaaatcagtgagaaaata

SEQ ID NO: 866 - DNA, 401 bp, Homo sapiens
atgactcagcatagtgttaatggtcttccagatgaaggaggggacatgaacatgtgtctgtcccaataaaggttgagacaaggtttgttgtgcacgtgcgcgtgtgtgtgtgcgtgtgtataacagtgaggagactgtaattagcaggaaaaattggggttttgaaagtagaccacagtcttgtcattgtaccatgactcmccaggaggacagaggacaagtaccctactcctgtgtaaatccagactgccaagtagagcactgagatttgatgagtacttaagaaatgcttgcttgattaattggtaaaagatattaaaggggaagattttatatcacattcaaacatatgaagagaaatgttaaaaatgtttaaagttccatttccagtctcactttcc

SEQ ID NO: 867 - DNA, 401 bp, Homo sapiens
atgtggcagactgccagttgccttccccagcataacattttcccaatattcattaggaaaagaaccctttaattgtacccaattaaaataccgaatctcccagcctcttctgcagcagatgtggctgtgtgactaagttctgtccaataagatataagtatacatgtttggtgagatttccaggaaggatgctcaagtggrgatgactaagtcagaagaaagttccttttagctttcctgcattcctagaattctgatgcaaaagctggagctacagcagcaatcctggactatgaggtaaccttgggagtactagggaattgggatgctagtaactttctagaagcaccaactcagccccagaatgcctcctgctgacttcttttacgtgggagagtaag

SEQ ID NO: 868 - DNA, 401 bp, Homo sapiens
gtccttcactagtatggccttttccaatgtcttgaaaggagtcctagtcacatgttcacatgcttacacatttatgtaaaatatgcaggataagataattaaactacaattatctaagatggcagtctttttttcactctgattttctgtccaaaatattcctcttgtggaagtaggtttggaatggccctgaacattttyggaatctgaactgagagaaagttgagtgaaagatacattgatttaaggcatagtgagatgtctagtaaagttattgtaaggtattccagtgttgaaaaggcttccagaaatatgccaaaaccgactgtgctgactcacatgatgtcatgccagaaagatgaagggccagagattgtatgatgacctgagtttgtccttgt

SEQ ID NO: 869 - DNA, 401 bp, Homo sapiens
ccatactgtaaaactgtcttcgcaaaatctcatcacaagctgaaaagtgatccctggtgataaacaactgagatggttattcacctccatgactagcctttcagggcctcactttctatatccatcaaatgggaagaacaatagatgcctcatcctcctcactatgttgctgtgagcatctgttgaagtagtggctattcragtgcattgaaatgcatcagtcagtacacagatacaagggcttctgataactcatacctgaagaatttttgtcaaccctgaagggatttgcttcttggtatacgggtattaaaatactagtataatttctctaacgggagtatgatgtcactagttccagagtcttttcatagatggatgggttttatgataaataactc

SEQ ID NO: 870 - DNA, 401 bp, Homo sapiens
ttgaaatgcatcagtcagtacacagatacaagggcttctgataactcatacctgaagaatttttgtcaaccctgaagggatttgcttcttggtatacgggtattaaaatactagtataatttctctaacgggagtatgatgtcactagttccagagtcttttcatagatggatgggttttatgataaataactcaccctcrgtgttaacttggctttccaactagccaaacaggcctttgtggaacaaggttagcaaatagcatttgggcaaacgatcaaaagggtctccctctcttctatcactctctttatctctcttggtacctctctctgactttctctccctcctttaaaaagttatctctgttttttttaattttttttacattaaaaacaacaa

SEQ ID NO: 871 - DNA, 401 bp, Homo sapiens
aaaagttatctctgttttttttaattttttttacattaaaaacaacaaatgggcccttcagaatagtcgaaaactttagaatgcaaagatatcaaaaaataagaaataacctagatcagaaaacagataaatgattgccaggggttgggattgggaggagttatttacaaggtgaatgaagaaattatgaggggttgtggracttttctatattttgatcttgaaaattatataactatatacttgtgttaatcttgtagaagtgaacactaaaaagggtgaattttattataaacaattttttaagagaacaaaaaatgtactataatcccaccagccaataacacactattaacactttggcgtacttctgactagtcttttttttttttttttttttt

SEQ ID NO: 872 - DNA, 401 bp, Homo sapiens
tgaataaaatgtactccctttactacttttttttttttttttttttttttttttgagacagggtctcaccctgttgcccaggctagagtgcagtggcgtgatcatggcccactgctgccttgacctccagggctcaagcaatctgcccacatctgcctcctgcctgtgttgctcagactggtcttgaactcctgagctcawgcagtctacctgccttagcttcgtaaagtgctggaattacaggcgagagccaacttgcccagccctgtatttcctttactttgaactgcatttgtgtatccttggttcatgttctatttgatagccatttcttcttaattagagggatttcttttttttagattagaaaaactagcccttttggctatgataagtggttt

SEQ ID NO: 873 - DNA, 401 bp, Homo sapiens
aactgcatttgtgtatccttggttcatgttctatttgatagccatttcttcttaattagagggatttcttttttttagattagaaaaactagcccttttggctatgataagtggtttatatttccttttgtgtgctacttgccttttgtctttatttggcttttttttggacttgcattatttatttaagatttacgtagytggatttctttctcctttcacatatggcctctctcacttcaatattatgtagaaaaaaacctctgaaataatgaattcctatacttttatgggttctttttttattttgatatttgacccatctggaatttattttggtataagaatgaggtagattttcaacaatttattccactaaatcataaattagtacacctttt

SEQ ID NO: 874 - DNA, 401 bp, Homo sapiens
ctttctgtgcctggcttatttcacttaacataatgacatccagttccattcatgttgatgcatataacagatttcattctttttatggctgaatagtaatccattgtatgtatatacacatataacgtctgtatatataatgtgtatataaaatgtatatccataatatatgtatatatacacatatatgtaatatatatwgtgtgtgtgtgtgtgtgtgtgtgtatatatatatatatatatatatatatatatatatatctcacttttttttttgagacagagtcttgctgtgttgcccaggctggagtgcagtggtgcaatctcagctaactgcaacctccacctctcggttcaagggattctcatgcctcagtctcccaaaaagctgggactacagt

SEQ ID NO: 875 - DNA, 401 bp, Homo sapiens
agaaaccaaagattagggaaaatatttttagaacaagctcagggaagtcatataggtttaaaatatatagtctatgcaaataatggcacacatttcagaatggaaacaaaaataagtggcagataatgtgtccaagtaatattggtagcaaatggactgttacgagagcaaatgatattttgcagagctgagagtgtgacytgtcttcaattatttgaatccctatcctacaaaagcattgaaaaaggaagatctggagccaatgactgtgtattacatatattttcattcagtacaagcagacatcatcagtgtgctatatactactttcattattattattatcttaattaaagctgtctyacgagccaggcgcagtggctcacgcctctaatcccaac

SEQ ID NO: 876 - DNA, 401 bp, Homo sapiens
cgagagcaaatgatattttgcagagctgagagtgtgacytgtcttcaattatttgaatccctatcctacaaaagcattgaaaaaggaagatctggagccaatgactgtgtattacatatattttcattcagtacaagcagacatcatcagtgtgctatatactactttcattattattattatcttaattaaagctgtctyacgagccaggcgcagtggctcacgcctctaatcccaacactttgggagaccgaagcaggtggatcacttgaggtcaggagtttgagaccagcctggccaacatggtgaaaccctgtcgctactgaaaatacaaaaattagccaggcatggtggcaggtgcctgtaatcccagctacttgggaggctgagacaggagaatt

SEQ ID NO: 877 - DNA, 401 bp, Homo sapiens
ccctgtcgctactgaaaatacaaaaattagccaggcatggtggcaggtgcctgtaatcccagctacttgggaggctgagacaggagaattgcttgagactgggaagtggatgttgcagtgagccaagatctcactgctgcactccagccaggatgacagagtgagactctgtctcaaaaaaaaaaaaaaaaaaaaaaaaargmcaacawcaacgacaaaactgtctcatgatgaaatgggatgctttcactagccgtggttgctcatgcctgcaatcctagcactttaggaggctgaggcaggtgaatcacctgaggttaggagttcaaggccagcctggccaacatggtgaaaccctgtctctactgaaaatacaaaatttagccgggtgtgctggtgca

SEQ ID NO: 878 - DNA, 401 bp, Homo sapiens
ctgtcgctactgaaaatacaaaaattagccaggcatggtggcaggtgcctgtaatcccagctacttgggaggctgagacaggagaattgcttgagactgggaagtggatgttgcagtgagccaagatctcactgctgcactccagccaggatgacagagtgagactctgtctcaaaaaaaaaaaaaaaaaaaaaaaaargmcaacawcaacgacaaaactgtctcatgatgaaatgggatgctttcactagccgtggttgctcatgcctgcaatcctagcactttaggaggctgaggcaggtgaatcacctgaggttaggagttcaaggccagcctggccaacatggtgaaaccctgtctctactgaaaatacaaaatttagccgggtgtgctggtgcatg

SEQ ID NO: 879 - DNA, 401 bp, Homo sapiens
ctactgaaaatacaaaaattagccaggcatggtggcaggtgcctgtaatcccagctacttgggaggctgagacaggagaattgcttgagactgggaagtggatgttgcagtgagccaagatctcactgctgcactccagccaggatgacagagtgagactctgtctcaaaaaaaaaaaaaaaaaaaaaaaaargmcaacawcaacgacaaaactgtctcatgatgaaatgggatgctttcactagccgtggttgctcatgcctgcaatcctagcactttaggaggctgaggcaggtgaatcacctgaggttaggagttcaaggccagcctggccaacatggtgaaaccctgtctctactgaaaatacaaaatttagccgggtgtgctggtgcatgcctgta

SEQ ID NO: 880 - DNA, 401 bp, Homo sapiens
ctttaggaggctgaggcaggtgaatcacctgaggttaggagttcaaggccagcctggccaacatggtgaaaccctgtctctactgaaaatacaaaatttagccgggtgtgctggtgcatgcctgtaatcccagctactcaggaggctgagacaggagaattgcttgaacccgggaggcagaatttgcagcgagccgagatygtgccactgcactccagcctggacaacagagcagaacactgtctcaaaacaaaacagaacaaaaaaagaaaagggatgctttgtggaacagggagattacttgcactggaattgttcaagccaagttctatcaacatttgacacagaaacacaygaccatcgtaaggtctttcccagctcagcattctgtgactgcgtgg

SEQ ID NO: 881 - DNA, 401 bp, Homo sapiens
gagaattgcttgaacccgggaggcagaatttgcagcgagccgagatygtgccactgcactccagcctggacaacagagcagaacactgtctcaaaacaaaacagaacaaaaaaagaaaagggatgctttgtggaacagggagattacttgcactggaattgttcaagccaagttctatcaacatttgacacagaaacacaygaccatcgtaaggtctttcccagctcagcattctgtgactgcgtggtctttgtactgagttttacatgatatggatttcttaccttagaaggatcagtttttaaaagatgggctgaatgaatcaaatcagagaacactatttgcctacccaatatctagtctccacagctagctggggacactttatagccacgttaaaa

SEQ ID NO: 882 - DNA, 401 bp, Homo sapiens
ccttaagaagggagacagaggatgctaacatggaacttgtcctttgccttcccattctcctttctgccatctggatcaggatatctggccatgctgaaatcatgagacaacatgaaggataaaatcctcaaactaagaatagaaatcagaacattaggacctggtctgagttcattgtggagcttccccagcccgctcagkctgcccccagtcttcccatttttagaaaaattaaaactatggtttgttaaagcttctattctgatggtctctgttacttgtagctgaacgcaatgaattgtgagatacgatttaccacaatttttttctttctttctttcttttttcttcttcttcattttttttttttttttwttttttaaagggttgtgccatgtcac

SEQ ID NO: 883 - DNA, 401 bp, Homo sapiens
ttgtggagcttccccagcccgctcagkctgcccccagtcttcccatttttagaaaaattaaaactatggtttgttaaagcttctattctgatggtctctgttacttgtagctgaacgcaatgaattgtgagatacgatttaccacaatttttttctttctttctttcttttttcttcttcttcattttttttttttttttwttttttaaagggttgtgccatgtcacccaggctggagtgcaattgtgcgatcatgactgactgtggtgtcaacctcccaggctcaagcaatcctcccacctcagtctcctaagtagctgtgactataggcatgtgccaccatgccaggctaatttttgtattttttgtagagatggggtcttgctgtgttgcacaggctg

SEQ ID NO: 884 - DNA, 401 bp, Homo sapiens
cctgggaggttgaggttgcagtgagccaagattgcaccactgcactccagcctgggtgacagagcgagatcctgtctcaaaaaaattaaataaatcaatatatggtaatctaatgggatgctatgcagcactaaaagtatattttaaaaaaaacttgagaaatgcttctaagatgaataatacacaattaagtcaattacmtgacttcaaatattattataactgcatgtggacaagaagacaaaaccttcaaggaaaaaaagttttgatattatgagattatgggtaacattgtattcccagccttgaatttctgttattgttactataatatgtgtacaatttttttttagtgaagtaaaacaaacaagtaaaagaaaggttgaaacttcacaatgtag

SEQ ID NO: 885 - DNA, 401 bp, Homo sapiens
tagctgggactacaggcacacaccaccacacctggatatagttttttttttagagatgaggccttctacattgcccagtttggtctcaaattcctgagatcaagcaatccccccaccttggctcctcaaagtgctgggattacaggtgcgagccaccgtgcccagcctcatcagcatttttagacagctacccctctgtgrtactctgtggtgagaaataagtttaagagataagtatgcagttatgaggaaagrtgatagaaccacaccatttttatgaataatatactaaaatatattcttaaaaaacttgtcagttgtatatttgataatagcatatttttacttagtccttattaaagatctcgggaaattcaaatctgtttcatctttgatcagga

SEQ ID NO: 886 - DNA, 401 bp, Homo sapiens
gatgaggccttctacattgcccagtttggtctcaaattcctgagatcaagcaatccccccaccttggctcctcaaagtgctgggattacaggtgcgagccaccgtgcccagcctcatcagcatttttagacagctacccctctgtgrtactctgtggtgagaaataagtttaagagataagtatgcagttatgaggaaagrtgatagaaccacaccatttttatgaataatatactaaaatatattcttaaaaaacttgtcagttgtatatttgataatagcatatttttacttagtccttattaaagatctcgggaaattcaaatctgtttcatctttgatcaggagagaagatgttgcccatccttagcccagagttagaaaggagaaatcatgtgatt

SEQ ID NO: 887 - DNA, 401 bp, Homo sapiens
ctggaaaaatcttctaaaactcttccttctcaagaagtcctgcaactggagctactaatgaaagctctttccagtagcccttacagctaattttctgttcacatatttgtcttctgctgtaaagagctgtgcctcatagtgtattaagggctggcttttcctttcattgtaagggactttccaccacaaacacaaggccaycatggccagcaatgcacaaaacagcagagtatggtcggcccttaaagacaaggtttgacttactcctctcttctcttttttacagacatgtttctctactataaacttcactcttagctttattttcaagaataaaatatttctgttttcaaattggcatcttacgattcagcagactaacccaagaaataattttatgg

SEQ ID NO: 888 - DNA, 401 bp, Homo sapiens
aatgcacaaaacagcagagtatggtcggcccttaaagacaaggtttgacttactcctctcttctcttttttacagacatgtttctctactataaacttcactcttagctttattttcaagaataaaatatttctgttttcaaattggcatcttacgattcagcagactaacccaagaaataattttatggaataatcatawttcaatatcttatttcttttcaaaggaacatttaaaagcttataaaactaggtataacaatgaagctgtaaaagaaagtaagaaaacacaatcaaagttaaaatgaaccaagctaaaaggtaaatataattattggtgttaggctccatatttgcctacaggcttcctaatattcagagcaaaatggaaaacaaactgtt

SEQ ID NO: 889 - DNA, 401 bp, Homo sapiens
aatcaatgtgccccatcttctacccttctgcataggacccccattcccttgacatggtgattttccagaggatgggtacctaggtacctggccaataagagttcgagatcaataagagtcttcccagaggttaatacatatgctttggaatggagtttattgcccactaaagatgctaagctggaaaaatataaattgggrctatccattggctaaattccctgccctgaggagcaggcctgtctccagtgggaggaagaaaactgaacagaggagaattgcaaatggagagagagcaagccctgtgtactgagttctggcttctgtccctgaggccctgaaacctggctgctgcagcttttgattctgaccatgatccaagagtccttccaagcagtgag

SEQ ID NO: 890 - DNA, 401 bp, Homo sapiens
ataaaccttgaataaaagccaagggcataacattaaagcaaaattgagttaaagccattttggaagaattagcccagtgcacatagagtgttcaacatttgagtggctcaattcacccaagaaagcttcaagaagttgaaggacactttttaactttgacagctttcttcatgtgttcctttgtttccccatttacccaarcttctgataaaggttgaataacaagtattttgagattctaattttcaaccagagctaacattttccactactaagtgagaaagggatctaaatgcttcagagactgggggaaattagaggagagcaaagttatgctacttgtatctraatataagaccacttgtctctgcacagaattgacccctgtgggacctttgggg

SEQ ID NO: 891 - DNA, 401 bp, Homo sapiens
ttttaactttgacagctttcttcatgtgttcctttgtttccccatttacccaarcttctgataaaggttgaataacaagtattttgagattctaattttcaaccagagctaacattttccactactaagtgagaaagggatctaaatgcttcagagactgggggaaattagaggagagcaaagttatgctacttgtatctraatataagaccacttgtctctgcacagaattgacccctgtgggacctttggggatacctgcaagatatgcaggctgtttttttctatcaataaacyttggattttcaacaacacaaaaacacatcatcaattagatccccagagtcatgaaccaaaacagttttcacatgaaatttattcaaagtaaggatttgtagtta

SEQ ID NO: 892 - DNA, 401 bp, Homo sapiens
tttcaaccagagctaacattttccactactaagtgagaaagggatctaaatgcttcagagactgggggaaattagaggagagcaaagttatgctacttgtatctraatataagaccacttgtctctgcacagaattgacccctgtgggacctttggggatacctgcaagatatgcaggctgtttttttctatcaataaacyttggattttcaacaacacaaaaacacatcatcaattagatccccagagtcatgaaccaaaacagttttcacatgaaatttattcaaagtaaggatttgtagttacctgttgtgatatgggaaaaccacacagcagcttggcttccagtgtgctttccagagtgaattagttttaaagtgtttattttctttattccctcc

SEQ ID NO: 893 - DNA, 401 bp, Homo sapiens
gataagggagaaagaaggaacaaggccagctagacatgttgtggggcccagtgggaaatgaaaatgctgagtctctcattaaaaaatcattaggaatttcaagagggtaatagtagagcaccaaactgtgcattgtacaggacttttactcataaagccagctctaagaataaaacatcctatattcattatgcccggggygcttccatttactcactgagtgcctaccatgacagccactgtggtaggtacttaattctacctaaaagcaataatacaggattaggatagaagcccaaatgaagaagaaaccaaacatagctccaatttatagcacctaagagcattttcacctgtaaggaattttttctatttttacaggaaaratcaagggatttgcc

SEQ ID NO: 894 - DNA, 401 bp, Homo sapiens
tcattatgcccggggygcttccatttactcactgagtgcctaccatgacagccactgtggtaggtacttaattctacctaaaagcaataatacaggattaggatagaagcccaaatgaagaagaaaccaaacatagctccaatttatagcacctaagagcattttcacctgtaaggaattttttctatttttacaggaaaratcaagggatttgccctgattcttggagtacttaagtgcaaattttgaagcatttcaattgttgaaaacatatctttttttwatatactttaagttttagggtacatgtgcacaacgtgcaggttagttacatatttatacatgtgccatgttggtgtgcttcacccagtaactcgtcatttaatattaggtatatctcc

SEQ ID NO: 895 - DNA, 401 bp, Homo sapiens
agcaataatacaggattaggatagaagcccaaatgaagaagaaaccaaacatagctccaatttatagcacctaagagcattttcacctgtaaggaattttttctatttttacaggaaaratcaagggatttgccctgattcttggagtacttaagtgcaaattttgaagcatttcaattgttgaaaacatatctttttttwatatactttaagttttagggtacatgtgcacaacgtgcaggttagttacatatttatacatgtgccatgttggtgtgcttcacccagtaactcgtcatttaatattaggtatatctccaaatgctatccctcccccstcccccaaccccacaacaggccccagagtgtgttgttccccttcctgtatccatgtgttctca

SEQ ID NO: 896 - DNA, 401 bp, Homo sapiens
attcttggagtacttaagtgcaaattttgaagcatttcaattgttgaaaacatatctttttttwatatactttaagttttagggtacatgtgcacaacgtgcaggttagttacatatttatacatgtgccatgttggtgtgcttcacccagtaactcgtcatttaatattaggtatatctccaaatgctatccctcccccstcccccaaccccacaacaggccccagagtgtgttgttccccttcctgtatccatgtgttctcattgttcaattcccacctatgagtgagaaaatgcggtgtttggctttttgtccttgtgatagtttgctgagaatgatggtttccagtttcatccatgtccctacaaaggacatgaactcatcattttttttggctgca

SEQ ID NO: 897 - DNA, 401 bp, Homo sapiens
acaacaggccccagagtgtgttgttccccttcctgtatccatgtgttctcattgttcaattcccacctatgagtgagaaaatgcggtgtttggctttttgtccttgtgatagtttgctgagaatgatggtttccagtttcatccatgtccctacaaaggacatgaactcatcattttttttggctgcatagtattccatgrtgtatatgtgccacattttcttaatccggtctatcattgttggacatttgggttggttccaagtctttgctattgtgaatagtgccgcaataaacatatcttttttttaaaacttagcatatatctatttgccatctcctgggtcaaaaagccaatggaaagctcaatgaaatctccaaatattcttaggttcaccttga

SEQ ID NO: 898 - DNA, 401 bp, Homo sapiens
tggtgcctccaaggtaactgtttcctctacctggaacactcttcccttgatccttgcatgatttgctttgtcttgtcattccatgaaaataacttttactctgaaaagccttagccaagcccctaaagtagccccacagtcacatccactctcctgagcacttgttaccatctgattatgtttgttggcttgttcgtttgytgactgtttggaatataagcttcacgagggcagctgtgtaccctgttcaatgggacatcctcaacacggaggcagggcctggtacagcacagtcctcaataaatacttgataacaaaataaataatttatgttgcattttggaataataattatattcttagttacacattagctgtatctagaagactgataatactgg

SEQ ID NO: 899 - DNA, 401 bp, Homo sapiens
gttaaaactgaaagtaaatatagacaaaataattgaacatatttgacaaaatatagacatctaaaagtgaaaagcattttaaaagtgagaaaactcctagagagtttgaactattatatggtattttcacctttagattatgaatagcatgaatgagatgataacaatggtaataacaataaattcactataagttcttakaatttagaagataccattctagaagctttccatgaattatctcattaactattactgcagtcttatgaagtgagtattatgatcatttctaatcttatgcatgacaattgagatttaaagagtataactttccaaggtgacaaatttagcaggtgtcagaatccagttctgtcagaagaaataagtagaaaataaaggtg

SEQ ID NO: 900 - DNA, 401 bp, Homo sapiens
ttatgaagtgagtattatgatcatttctaatcttatgcatgacaattgagatttaaagagtataactttccaaggtgacaaatttagcaggtgtcagaatccagttctgtcagaagaaataagtagaaaataaaggtgggtttgttggcgactagataatcataataaacattgatataatcgtttataatttttcataamcgtagaaattatacaacctgtgtaaagccaaaatactttggtgatttctgggttcagaagataatgccttttgtagctatggagcttagatcttgtagctatatgtgtttgactgagggaagtggaaattctctaactgggatatcataccaggatgatgaattacctgtgcaaactctcactattgcaaggtcctatct

SEQ ID NO: 901 - DNA, 401 bp, Homo sapiens
cagacaccatctggtgatggattggtccgtcatgcggtatcagtctgcagaatcatcttcagtactttaaggacagtgcagactagaggaaagattccaggttagatgtcagctatttgccaattagatgacctgggtatgtaatgagaatgcatagccccacttcgtctggtaaattgggactgtaattcttactttgtyttagcccacaggatgatatgtatagaaagtgagttataaactgtaaatgaagctgggcacagtggctcacacttgtaatcccagcattttgggaggccaaggagggaggatcacttgagcccaggagtttaagatcagactaggcaacatagggagaacttgtctctagaataaaatagaaaaacatagccaggagtggt

SEQ ID NO: 902 - DNA, 401 bp, Homo sapiens
aaaacatagccaggagtggtggtatgtacctatagtctcagcaacttgggaagctgagctgggaagatagcttgaggggaggagttcaaggctgcagtgagttgtgattgcaccactacactccagcccgggtgacagagcaagaccctgtctcaaaagacaataatattataaataaataaataaacaaactgtaaatgrtacaaatataaaagagcaatactaacgacaaataataatacatataatgaatgcattgataatgacagtgaaagttagaagtgattcttttagcacagagataagagattagctcatggctcaggccaggcctcacagattatctgtctcctggtgggactaatgcaagatctgaagtttggtctgtaactttgtcattt

SEQ ID NO: 903 - DNA, 401 bp, Homo sapiens
agtgattcttttagcacagagataagagattagctcatggctcaggccaggcctcacagattatctgtctcctggtgggactaatgcaagatctgaagtttggtctgtaactttgtcattttggtttgttctatggaccaaactctggagtactgattaacatcattgtctagcagttgaaagctctctgataaccttggrgagtgctagatagaatagatacaattttgccttttgattttcctttgcccaaacaagtggttcacatatgaagatgtcttttggaagggaaaaataaaaattacagattcccatgtaatagggaaactgagtcttaaaatccaacaccaccatcttatttctaagtcgtttttacattagggcttgttataaacctaggt

SEQ ID NO: 904 - DNA, 401 bp, Homo sapiens
tgtcttttggaagggaaaaataaaaattacagattcccatgtaatagggaaactgagtcttaaaatccaacaccaccatcttatttctaagtcgtttttacattagggcttgttataaacctaggttattttgttttgcctacgtgtaaatcttgatggattcaaaaattccccaagtaacttagtgagatttcaaaaagrtccttgattttagcagcgtttttataaaactgtcagttacagtagataacaatagcaattctattctcctccattttaaactggaatttactgattcaaatttttaagagaaaaagttcctgaacttgtccccttattctaggggaaaccattttggtgcctgtctatagctacttatggcctctctctcttgttttttg

SEQ ID NO: 905 - DNA, 401 bp, Homo sapiens
tcaccgtcacaacagtaccaagggggatggtgttaaaccagtcaagagaaaccacccctatgatccatcacctcccaccaggccccatcttcaacactgggaattacaatagaacatgggatttcggtggggacacagatccaagccatatcacctagtaatcatcctcaccttcagttaaagcagcctgtgtgtttactrawgaaattagctacttgacaccaatcttttcagcaatactgctgtcagataagagaatcattgagtaaaatgccattaattgcaaataataaaacgtcattcattcaaatcacgtaatgagaagtttgaattctgtctccaaaaccaacccttacttttgtttatttatttttacctagtacccagggcatgattctgtc

SEQ ID NO: 906 - DNA, 401 bp, Homo sapiens
accgtcacaacagtaccaagggggatggtgttaaaccagtcaagagaaaccacccctatgatccatcacctcccaccaggccccatcttcaacactgggaattacaatagaacatgggatttcggtggggacacagatccaagccatatcacctagtaatcatcctcaccttcagttaaagcagcctgtgtgtttactrawgaaattagctacttgacaccaatcttttcagcaatactgctgtcagataagagaatcattgagtaaaatgccattaattgcaaataataaaacgtcattcattcaaatcacgtaatgagaagtttgaattctgtctccaaaaccaacccttacttttgtttatttatttttacctagtacccagggcatgattctgtcta

SEQ ID NO: 907 - DNA, 401 bp, Homo sapiens
tttagagacagagtctcactctgttgctcaggctggaatgccgtggtgcagtcatggctcactgcagcctcaaactactggcctcaagcaatcctcctgcctcagcctcccaaatctgtggaactgcatgcatgtgccaccacatctggccctggaatatgattttataagaaagctgtctctctattaaagttttatgcraagaggaaaactaaatcagtggacagagctaagagttagacracccagactttcctccctccgttgcctctgtttctgtctttgcaaaataaggaaatttgactagcttatctttaaaacctctacttgctcattctatgatggtgccttgagatggagattcagtgagagattcttgtttcagtgcttttatatattta

SEQ ID NO: 908 - DNA, 401 bp, Homo sapiens
gtggtgcagtcatggctcactgcagcctcaaactactggcctcaagcaatcctcctgcctcagcctcccaaatctgtggaactgcatgcatgtgccaccacatctggccctggaatatgattttataagaaagctgtctctctattaaagttttatgcraagaggaaaactaaatcagtggacagagctaagagttagacracccagactttcctccctccgttgcctctgtttctgtctttgcaaaataaggaaatttgactagcttatctttaaaacctctacttgctcattctatgatggtgccttgagatggagattcagtgagagattcttgtttcagtgcttttatatatttaacaaattttcaccgagtacctattacgtgtcaggacctgctc

SEQ ID NO: 909 - DNA, 401 bp, Homo sapiens
ctctccttactttcatttcttgacctactcctagacccatgcagataccaaattttacaaattttactaccagcaaatagttatctattatgcagttaaactgtgctatgtgtagggatgcagagcaaatcaagacatagcatatgccttcaagaagccaatgatgtccttgtgagaacaaaactcacatatgtaaaaaawaattgctagttcaaaatgtcagaggctgagaaccaggaatatggcctgaacagttgtgtgctctatcaggagagattcactaaaagttagtagacttcaggaataattttcagtgcacataaagcttgaacttaagtaacataggtagttttcagattttaaaagcaattttcagtaaatacaagtagagatatggcctg

SEQ ID NO: 910 - DNA, 401 bp, Homo sapiens
ctgtgtacactgagataaaagtagagtgggagactgagtttaccacctgtgctaaagcagcagctgttagcattggtgacattcattgttacatggatatcaattgagctgggattaggaagccgcctgtctcctcaagcttgttacgattcagtcacttggaaaaaaacaaaaacagactttcggatgaggattctaatkcccaggtgacctgaaagccaggttcagcgtagtcaatgagcaacatgaaatgaaatttccaatcagaattctcattagccttattcagcactacccagatggatgttccttttgatgtctttgtcatagcagcctcacctatgcaaatattgccagtattaccccttatagtaagttgaagaacttttaagggttgtgaa

SEQ ID NO: 911 - DNA, 401 bp, Homo sapiens
tagtcattgttgaaatccgtaatctctttctatcgccaaattgtcttaaaacgtctgtccagcacatcattgcaaccttgactgtcccttccactgtgtgttgaagagtcacaggtcccagggggagctgcgaagaaacgtaaaccaaataccatttcagtaactgttaagggacaattgtgacgattttgtaatgcttgrcatgttttgcttataatcttgtcctacaaagaagcctatcagcagagatgagagatttttgctatgcaaagattagattaatattgatatttgcagaactgggttcaacctgtgggagacctagtcgcaggtcttgtagaatttatagcatattaagaagatatttaaatatttggcttcagtgtgatggcctcatttct

SEQ ID NO: 912 - DNA, 401 bp, Homo sapiens
gtccgctgaaagatgagtcatcaagtctggttgaacctatctaatatctcttgaatcagtatgtctctgcatctgtattgccatcaccctagttctggccatcctcactgaccacctgactttctgcctaaatggtctcctactttctggtcttgtatactttcaaccctttctctgcaatcagagtgatattgcttccartgttgtacagacaattcttacaaggtcctgcagcttttctttcagtctttctttcttttttttttttttwttttgaaatggagtctcactctgtcacccaggttggagtgcagtgggcgcgatctcagctcactgcaacctctgcctcccaggtttaaacgattttcgttcctcagccttccaataactggggttacagg

SEQ ID NO: 913 - DNA, 401 bp, Homo sapiens
atctgtattgccatcaccctagttctggccatcctcactgaccacctgactttctgcctaaatggtctcctactttctggtcttgtatactttcaaccctttctctgcaatcagagtgatattgcttccartgttgtacagacaattcttacaaggtcctgcagcttttctttcagtctttctttcttttttttttttttwttttgaaatggagtctcactctgtcacccaggttggagtgcagtgggcgcgatctcagctcactgcaacctctgcctcccaggtttaaacgattttcgttcctcagccttccaataactggggttacaggtgcatgccaccatgcccagccaatttttgtatttttagtagaaagagggtttcaccatgttggccaaact

SEQ ID NO: 914 - DNA, 401 bp, Homo sapiens
gtgctgggattacaggcgtgagccactacacccagctctttcagtcttactgttcgtcatttttttccctcccctttctgcaccctcttcactctgctttcccattctctatgcctgggctacatcttaaaagacgccatgttctcctggggtctctggtgtccctgattctggaaatgctttcctgtctcttctctctamcccatttcacttagataagtcctatttatccttgagatttctcataggtggcagtctttttcccataagacttttcctgttctagacctggtggctcacacctgtgatcctagcactttgggaggcacagccagggcgaatgaacccaggtgtttgataccaacctgggcaacatagtgagactccatctctacaaaaaa

SEQ ID NO: 915 - DNA, 401 bp, Homo sapiens
gataagtcctatttatccttgagatttctcataggtggcagtctttttcccataagacttttcctgttctagacctggtggctcacacctgtgatcctagcactttgggaggcacagccagggcgaatgaacccaggtgtttgataccaacctgggcaacatagtgagactccatctctacaaaaaataaacaaccaggcrtggtgatgagcacctgtagtccaggcatggtggtgagcacctttagtcccagctactcaggagsctgaggtgggaggattgcttgagcctgggaggtcaagacttcagtgagccgtgatcatgccactgcattccagcctgggcaacagagcgagaccctgtcttaaaaaaaaaaaaaaaaagaagaagaagaagaaaag

SEQ ID NO: 916 - DNA, 401 bp, Homo sapiens
tgttctagacctggtggctcacacctgtgatcctagcactttgggaggcacagccagggcgaatgaacccaggtgtttgataccaacctgggcaacatagtgagactccatctctacaaaaaataaacaaccaggcrtggtgatgagcacctgtagtccaggcatggtggtgagcacctttagtcccagctactcaggagsctgaggtgggaggattgcttgagcctgggaggtcaagacttcagtgagccgtgatcatgccactgcattccagcctgggcaacagagcgagaccctgtcttaaaaaaaaaaaaaaaaagaagaagaagaagaaaagaaaaactttccctgatatatttaggttgagactagacaccctcttatctgctcccacaatgccc

SEQ ID NO: 917 - DNA, 401 bp, Homo sapiens
atgtgtgtgtgtgtccttttttggggggaggggggctggtggcaggacagggtctcactttgttgcccaggctggagtgcagtggcaggatcatggctcactgcagcctctacctcctgggctcaagtaatcctcccacctcagcctccctaatagctgggattacaggcatgcaccaccatgctcaggtagggttttttwaatttttcatagagacaggttcttgtcatgttgcccagtctggaatatatatatttttttgacttttattttaggttcagtgatacaagtgctggtttgttatatagataaactcatgtcacggggatctgttgtgcagattgttttgtcactcaggtactaagcccagtacccaatacttactttttcttttcctctct

SEQ ID NO: 918 - DNA, 401 bp, Homo sapiens
acatttacaagcaaatgtaaacttttaaggattcttacatcccataaaagcagtaattttggcatatagctcatcaacatgaaatgagtaaaaacatgggaaggcagtactttttgaatgttgtatgccatttggcaaatctacatgttcctcccttttttcgcatctccatgttcctcctaaatgaaggagttgttgttratgttggtttactttaatatgtccaattataccattatcatctatttatcaaaatagtgccatttaattgccttttgctttaagctgtattttatatgaaagattcctagtgttatttctgtcctttggaatattatccagcagagggaattttaggatctacttgataatacagatttgctaatttccacgttagtact

SEQ ID NO: 919 - DNA, 401 bp, Homo sapiens
acaaacctgcacatgtacccatgaacctaaaataaaagtttaaataaataaataaacttggtctccagtgttaaatatgatatgtcatcatcctcatttccttcatccagctattttatattcctcccatctgctctgtcctaatatttatattctgtaggccttatcgtgcatctcttattccttctaaatatgttttaytctgcctggttcctccactcttttggctcttgttttcctacttcctttaatgtaacagtaacacagtgagcacttaatagcagtctagaataaactctgtgttcctgctttaatctatatctggtctttatctctcacctttatctttacctctgtcactgtgtggacttacactgaaaacagaactataccatgccccc

SEQ ID NO: 920 - DNA, 401 bp, Homo sapiens
atccttcacagcaacctacaaagtcaatctggggctggtggaaattctcctctttcagccttttccttcttttggaatttgggggtgttttcacagagtgatttaccaagaaaacattctaaatcctcaaggatcacttatcccttacctcgtggttgtttgctcgagaccaagcacaactggacatttttgaacttacgwctttctccctaccctctttgttctccttctcccccttcataaaatctgacttcagtttggccttcaagtgagattgacttttagccccttccatttggcaaatccttcaacaaaaaaacagaagtgtcatttttacggggtgacaaagcattaagaagatcgctttttcagccttgctgtgcttcattataggtaagtcc

SEQ ID NO: 921 - DNA, 401 bp, Homo sapiens
ctctcagcaaaagagaacgcaaggaatgcatatttcatctcatggcgacctgaggatcgtcctcaattccatatgtaatactttctaaataatggtgacctttttcacgtccccttcctgtatatacaaagtactatgtggataatgcagcctgagtgagcttatgagctaatgcagggatttttattattaacaataatmatagtgaacaacagtttattcatgtaagatcaagcaactagtaagtggtagaaccaggactgggtcatagggtaggtacatgtgtaccacttttaaatattgccaaactactttgcaaagtattgaattattttacattcccaacagcagtgtctgggaattacaataatccttatcatgcaatgactggcgtattcatt

SEQ ID NO: 922 - DNA, 401 bp, Homo sapiens
ccaggactgggtcatagggtaggtacatgtgtaccacttttaaatattgccaaactactttgcaaagtattgaattattttacattcccaacagcagtgtctgggaattacaataatccttatcatgcaatgactggcgtattcattctttttaatttttgacattctaatctgtgtgtagtgccatctcattgtagtttkaatttgcatttcgctagtgactaatgatattgagcatcttttcatgagcttatttgcatatgtatgtcttctttgctaaagtgtctatgcaaatcttttgcccatttattaggttgtttgttttcttatattgagttataactttttttttttttacatattctgcaaacatttttaaccagatatgtagtttacaagtg

SEQ ID NO: 923 - DNA, 401 bp, Homo sapiens
tatatattttgtcagagttcgcccaaatggtacatttatttatctatttatttagagatggagttttgttcttgttgcccaggctggaatgcaatagcacaatctcagctcactgcaacctccacctcccaggctgaagcgattctcctgcctcagcctcccaagtagctgggattacaggtgccagccaccacacccggytcattttgtatttttaatagcaatggggtttcactatgttggttaggctagtgttgaactcctgacctcaggtggtccacctccctcggcctcccaaagtactgggattacaggcatgagccactgtgcctggcccaaatagtacatatttttgatgctattattaatgacattgttttattaatttatatttcaagttg

SEQ ID NO: 924 - DNA, 401 bp, Homo sapiens
caggtggtccacctccctcggcctcccaaagtactgggattacaggcatgagccactgtgcctggcccaaatagtacatatttttgatgctattattaatgacattgttttattaatttatatttcaagttgtttatttctattacagagctttctctactatgctgacatccatctgaggtctcttctcaacagaattgmctttaatgtccacatttctaccaagcttctcttcaaggaaatctatattttttctattactcaccttaaaattcttgtagcctctatccatttcccaattccgaagccatttctacatctttaggtgtttgttagaggagtaccccactttctcgcatcaaagtctgtatcagtcagtgtttgacagagaacagaaccaa

SEQ ID NO: 925 - DNA, 401 bp, Homo sapiens
actcaccttaaaattcttgtagcctctatccatttcccaattccgaagccatttctacatctttaggtgtttgttagaggagtaccccactttctcgcatcaaagtctgtatcagtcagtgtttgacagagaacagaaccaataggagatggataaataggtaggtaggcagattagtaggtagatagatagataggtagrtagatacatagatagataatctatagatatctaatgcctggaaagctaatttttctatatattttctctattattttagttgtttcagatagaaggacaaattggatccctgttactctatcttgaccagagtgaaaatctgattaacttttaatcctcagtctcctcatttgtaaaaygaaaataataataaaatctat

SEQ ID NO: 926 - DNA, 401 bp, Homo sapiens
ggtagatagatagataggtagrtagatacatagatagataatctatagatatctaatgcctggaaagctaatttttctatatattttctctattattttagttgtttcagatagaaggacaaattggatccctgttactctatcttgaccagagtgaaaatctgattaacttttaatcctcagtctcctcatttgtaaaaygaaaataataataaaatctatttcatgaggttattgggatgttagttttgttaatatgtataaaaacttggtgccttgtacataataaatactcaataaatgtatttaaattttgaacaacatatttgacatattgtgattwmcaagtatctatactcttttatgtttgttaatgttatatatggaggcaatctgactta

SEQ ID NO: 927 - DNA, 401 bp, Homo sapiens
tcttgaccagagtgaaaatctgattaacttttaatcctcagtctcctcatttgtaaaaygaaaataataataaaatctatttcatgaggttattgggatgttagttttgttaatatgtataaaaacttggtgccttgtacataataaatactcaataaatgtatttaaattttgaacaacatatttgacatattgtgattwmcaagtatctatactcttttatgtttgttaatgttatatatggaggcaatctgacttaacatcaaaaaaaaaaaaaagaccattcataagatgtagtcagtaccagtaaatgagagcacattttcctctaattgggtgtgtggatattggttttcaccctacttggagtttctgactatttgtcctagtgaccatcacta

SEQ ID NO: 928 - DNA, 401 bp, Homo sapiens
cttgaccagagtgaaaatctgattaacttttaatcctcagtctcctcatttgtaaaaygaaaataataataaaatctatttcatgaggttattgggatgttagttttgttaatatgtataaaaacttggtgccttgtacataataaatactcaataaatgtatttaaattttgaacaacatatttgacatattgtgattwmcaagtatctatactcttttatgtttgttaatgttatatatggaggcaatctgacttaacatcaaaaaaaaaaaaaagaccattcataagatgtagtcagtaccagtaaatgagagcacattttcctctaattgggtgtgtggatattggttttcaccctacttggagtttctgactatttgtcctagtgaccatcactat

SEQ ID NO: 929 - DNA, 401 bp, Homo sapiens
gcgttaataaggaaatgctggatagtcagaatcctacattaacccgagcctaaaatctgtagtatcgcttcaaatatctatgtagaaagcatagtttattaaactaaacatctcctgtaatcccagcactttgggaggccaatgtgggtgaatcacttgaggtcaggagtttgagaccagcctggccaacgtggcaaactmtgtctctaccaaaaatacaaaaattagccaggtgtggtggtgcaaccctatagtctgagctacttgggaggctgatcacttaatttaaaacttaaaagacctaatatccagaatctataaggcacttaaacagattcacaagcaacaaacaaacccattacaaactgggcaaacgacacgaacagacacttttcaagaga

SEQ ID NO: 930 - DNA, 401 bp, Homo sapiens
gtcattcgatgaaataggctgaatttagctaaaagggagttcatgtcctttgaagaaacatggatggagctggaggccattatccttagcaaatgaacacaggaacagaaaacaaaataccacatgccctcacttatcagtgggagctaaacaaagaaaacacatggacacaaagagaagaacaacagacactggggtctrctgagggcagaaggtgggaggagggagaagatcagaaaaactacctatcaggtactatgcttcatacctgggttacaaaataatctgtacgtcaaatgcctgtgacacaagggtacctgtataacaaacctgcatatgtacccctgaacctaaaataaaagttgtttgtttggtttttttgtttgtttgtttgttttgag

SEQ ID NO: 931 - DNA, 401 bp, Homo sapiens
ggttacaaaataatctgtacgtcaaatgcctgtgacacaagggtacctgtataacaaacctgcatatgtacccctgaacctaaaataaaagttgtttgtttggtttttttgtttgtttgtttgttttgagacagagtcttgttcttgttgcccaggctggagtgcagtggcgcgatcttggttcactgcaacctctgcctycttggttcaagcaattctccctgcctcagtcacccgagtacctgggacaacaggcgcctaccacaacgccaggctaatttttgtattttttagtacagatggggttttgccatgttggccaggcttgtctcraactcctaacctgaggtgatctgcccacctcggcctcccgaagtgctgggattacagttgtgagccac

SEQ ID NO: 932 - DNA, 401 bp, Homo sapiens
agagtcttgttcttgttgcccaggctggagtgcagtggcgcgatcttggttcactgcaacctctgcctycttggttcaagcaattctccctgcctcagtcacccgagtacctgggacaacaggcgcctaccacaacgccaggctaatttttgtattttttagtacagatggggttttgccatgttggccaggcttgtctcraactcctaacctgaggtgatctgcccacctcggcctcccgaagtgctgggattacagttgtgagccaccacgcctggcctaaaagtttttttaaaaagagaaaacactttccttaccctttgtagctcattgtctatctaacacaccctgtcactctcatcagccttgaacttcttacaaagccattcaataaaatgaaa

SEQ ID NO: 933 - DNA, 401 bp, Homo sapiens
tgtctatctaacacaccctgtcactctcatcagccttgaacttcttacaaagccattcaataaaatgaaaggaaataggtgcagtgggccccctctgattcgtggctttgatttctttggtttcatttatccacagtctaaaaatattaaatggaaaatttaaaaaaaaaacaattcataagtgttaaattgcatgccatkctgagtagcgtgatgaaatcttgccctgtyccactctgtcccatgcgggacatgaattcttcccctttgtccagcagttcctcactgtctatgcctccgacctgttagtcactcagtagccctctcagttattagatcgaccatggcagtatgggggtgcttgtgttgaagtcacccttattttacttcctaatggcctc

SEQ ID NO: 934 - DNA, 401 bp, Homo sapiens
cagccttgaacttcttacaaagccattcaataaaatgaaaggaaataggtgcagtgggccccctctgattcgtggctttgatttctttggtttcatttatccacagtctaaaaatattaaatggaaaatttaaaaaaaaaacaattcataagtgttaaattgcatgccatkctgagtagcgtgatgaaatcttgccctgtyccactctgtcccatgcgggacatgaattcttcccctttgtccagcagttcctcactgtctatgcctccgacctgttagtcactcagtagccctctcagttattagatcgaccatggcagtatgggggtgcttgtgttgaagtcacccttattttacttcctaatggcctcaaagcacaggagtagcaatgctggagattt

SEQ ID NO: 935 - DNA, 401 bp, Homo sapiens
gaccagcctgggcaagatggtgaaacgccgtctctactaaaaatataaaaattagccaggcacagtggcaggtgcctgtaatcgcagctacttgggaagctgaggcagagaattgcttgaacctggaaggcagaaaagttgcagtgagccgagatcatgccactgcactccagcctgggcgacagagcgacactctgtctyaaaaaaaaaaaaaaaaaaaagaaagaaaaaagaaatgagcaagcactgaacacctactgtgtgcaaggcacttgatagccttcctgttatttcttcctcactacaatcccatgaagtagttcttatccccattttacaagatacaaaaattgactctcaaaaagcttaagaaatttgcttctagttgcacagtcttatag

SEQ ID NO: 936 - DNA, 401 bp, Homo sapiens
aagagcagattctgttgccaccttcccaagcaggtagtgcctttaaaaaacaaaaaacaaatgttcacctactatatgcattaccatgcaccttacacttttcatttaataaatataccccagcaatggtgatagcagattttggaccagcagtggggataaagaaggtcctggtcacctaggtgcctaaagagaagcagrtgaagagagaagaccctggagaaatgttttcctgttttgcacctgcaggtgcttgacatgcctctgaaaatgatctcagtgctgtgcagttccacagctgcagtggtacccacaatgccaaaacttgggatgcaaaggggcgggggtaatgacaaaaatcagggaaggaggaaccatagcaaccacctgatctgcacact

SEQ ID NO: 937 - DNA, 401 bp, Homo sapiens
gtattttatatacctctcttcaatgcctagtgtccttagacagtaagctccctgaagacacaggctatgcctactttattcatcatcgtgtcttcagtgcctagcaccctgcttggtatgcattcggttcatgaatatatgagggaacctgctgctgctgttcagcattcacacctccatttcaaccccatcagaaccttyttcatgcttcctcttttgtagtgtctcagaaactcattctgttttcttcttcatctttttttttttttttttttaatggagtcttgctctgtggcctaggctggggtgcagtggcatgatctcagctcagtgcaacctccacctcctgagttcaagcaattctcctgcctcagcctccctagtaactggggctacaggct

SEQ ID NO: 938 - DNA, 401 bp, Homo sapiens
ttttttttctctccaaacaactggttacccacacttgtacagtcatgtagagacaaaatgctcatttataattccagataccccatgtaattattgcctatgataatcaggtaatctttatgaaactattcctatacaattttcaaatctcagtttacaatcatgagtattttaccataatcttcataatgccctcttgawtatatttgcttaatatcattttgaatttagtgatatttaagttaacatattttatatgttttcatttcattagtaggcttttaaaaatttacttttttgtgagaatctgatttttgtgagactctgtgaacaaatatcctcactaattctttctaatggtataatgtgaatttgtcattgacaagtgttacaaaaaagac

SEQ ID NO: 939 - DNA, 401 bp, Homo sapiens
ttcattccttctttgtcaagccccctaacttccctaaacttcagtgccctcatcttaaatataatgacataatagtgtctctcataagattggtagaattacatgggataattcatcttgcatggtcaggggcacggtctcgggaaccagactgtgtgggtttgagctgctcagtcttggacaaaagattaaatatatctrtgcctttgttttatcatctataaaatgggaataaccatagtaccttattcaaaggttgttgtgaagattaaaataaattaatcctgtaaaaatgcttaggtttctggcacatagtaagggcttagtaaaaactaggtatttttacctggtatgtgcaagcactgtatrtatcctgatatactttctcatctataattctg

SEQ ID NO: 940 - DNA, 401 bp, Homo sapiens
gctcagtcttggacaaaagattaaatatatctrtgcctttgttttatcatctataaaatgggaataaccatagtaccttattcaaaggttgttgtgaagattaaaataaattaatcctgtaaaaatgcttaggtttctggcacatagtaagggcttagtaaaaactaggtatttttacctggtatgtgcaagcactgtatrtatcctgatatactttctcatctataattctgtttctgtgcactagtttatatatttatttaatggaattattttctacagatttagtcagattttagaacacaaagcaagtggatacttagtagccataggggaatctgattttgatgtctcctacccaaagtttattcatatttaatattatatatacataagtctta

SEQ ID NO: 941 - DNA, 401 bp, Homo sapiens
aaattttataaacaagaaggctgggtttgttttttttaagtttttctgtttttaaatttctgtttatttagcgggtacaagtgcagttttgttacatggatataactctggtctttcagtgtaaccatcactcaaatagtgtaccttgtacctattacgtaacttgtcattcctcaccctcctcccaccctcccatctttytgagtctccaatgtctattattccaccctctatgtccatgtgtactcattatttagttcttacttataagtaagaacatgcaatatttgactttctgtttctgagttatttcacttaagataatagccttcaggtccatccatgttgctgcaaaagacatgaattgattcttttgtatggctgagtagtattccatggtg

SEQ ID NO: 942 - DNA, 401 bp, Homo sapiens
tatcagtcatcagcttaatctcaaaatattgtgtgctccataattgaccttcattagggcattatggacaggggcttactatatgctaagctatgtaaatacagatgctcctcagcttataatggggttgtctggataaatccattgtaagttgatccacacataaccctattaaaagtcaaagagcatactgaatgtgtwttgcatttgcaccattctaaaatcaatgtgtcccwtgtgtaaaatcagttgcatccgaaaagcctgaaacgtgtacatattctttgatctagccatcttattctaaaaatcaaaataaaatcaaaataaaatcaaaatataggtaagttgaactgtcataagttggggaccatgcgtactctgatagtcagtgttatgta

SEQ ID NO: 943 - DNA, 401 bp, Homo sapiens
ctccataattgaccttcattagggcattatggacaggggcttactatatgctaagctatgtaaatacagatgctcctcagcttataatggggttgtctggataaatccattgtaagttgatccacacataaccctattaaaagtcaaagagcatactgaatgtgtwttgcatttgcaccattctaaaatcaatgtgtcccwtgtgtaaaatcagttgcatccgaaaagcctgaaacgtgtacatattctttgatctagccatcttattctaaaaatcaaaataaaatcaaaataaaatcaaaatataggtaagttgaactgtcataagttggggaccatgcgtactctgatagtcagtgttatgtatgaacttgaccaagccgcagggtcccagacatttg

SEQ ID NO: 944 - DNA, 401 bp, Homo sapiens
ggctctcctggttctcaggccttcagatttagactgaaactacactatcagcattcctgagtctccaaattgctgactgcagatcttatgactttccagtcattccattccttgtcataactctctttctctttctttctctctctctcctctctctctctctctctctctctacatatatatatatatatatatatatayatacatatatatatatatatatatatgaacagatacatcctattggttctgtttctctggagaaccctgactaatatacagttatgtgtcacttaacaataggatataytccaaaaatgtgtcattaggcaatttcatgatttgtgaatatcatagaatattcttacacaaacctggatggtttgctgcacacctaacct

SEQ ID NO: 945 - DNA, 401 bp, Homo sapiens
ccttgtcataactctctttctctttctttctctctctctcctctctctctctctctctctctctacatatatatatatatatatatatatayatacatatatatatatatatatatatgaacagatacatcctattggttctgtttctctggagaaccctgactaatatacagttatgtgtcacttaacaataggatataytccaaaaatgtgtcattaggcaatttcatgatttgtgaatatcatagaatattcttacacaaacctggatggtttgctgcacacctaacctgatgcacactgaggctttatgggatagcttgttgctcccagactagaaacctgtacagcatattactgtactgaatactggaggcaatttctaacacaatgacaagtat

SEQ ID NO: 946 - DNA, 401 bp, Homo sapiens
tggctctttggccttcacctgtctgcattatggttatagctgagatgccaggaaaaacacaagatgagtctgttcagctcgaagctgactcaactggtttctaccacctcaattcaaactaggaatgagatatttttcttcctttgctttttagggcaattaatgttcccacatatctccctttttcttgccatttcttarcatcctaaacactaattttgcaaaataatgttgtaaatgctttgcatagtcactatcttatgttgcccttcctgttcacaagacagccgtccgtgtcagttgaagatttctatagatatgcatcatctctgatagataaaggcatgtttcagagactatcctggtgggagtattttacttttgaaaccaactaaatctgg

SEQ ID NO: 947 - DNA, 401 bp, Homo sapiens
tgtcattttcttcagtgattttttttccttgggttgttcttatttctacatcattatgtttattatatgaaggaagcagtcagcctcatgtttattctctggtagagaagaggaaaacagtaatttttgagcatgaatgcataagaccatacagtttatggaaatggctgtagcttctctaacctttcccctttcatacayacttgtttccatgtacacttcattccccctttttccccctttaactctctttgtatttgtatccctccttccctatgccctttttactcaattcattccctacatcacaacctgtggtttttgtatctgatcatagttttcaccctattgaaaatcatggctggccaagtacatgttaacaggaaaattctggacagtcc

SEQ ID NO: 948 - DNA, 401 bp, Homo sapiens
atcatagttttcaccctattgaaaatcatggctggccaagtacatgttaacaggaaaattctggacagtccctttgtacacaaaccttactgcttagtttcatctgtgcagattgctgtatactcagccctgcagcagagagaccacactgcagcctttagtaggaaaaggataggaatgacaatacactgcagacacttycgtgagtaagttgctaaagcgtcagtaaaacatcatggtgaggcctctgcaatcagcctgcttagrtttaaatgacaattctgtcacttacaaatatataaccatttggatagttatgtttgcactttaagcctcatgttagttatctggaatagtatataatattacctacctttagtgtcatcataagaattaaatga

SEQ ID NO: 949 - DNA, 401 bp, Homo sapiens
agtccctttgtacacaaaccttactgcttagtttcatctgtgcagattgctgtatactcagccctgcagcagagagaccacactgcagcctttagtaggaaaaggataggaatgacaatacactgcagacacttycgtgagtaagttgctaaagcgtcagtaaaacatcatggtgaggcctctgcaatcagcctgcttagrtttaaatgacaattctgtcacttacaaatatataaccatttggatagttatgtttgcactttaagcctcatgttagttatctggaatagtatataatattacctacctttagtgtcatcataagaattaaatgatttttgtgatataaagtgttaagtgtggtgccagaccctggcaaagttggtaattgtccccttcct

SEQ ID NO: 950 - DNA, 401 bp, Homo sapiens
gggagggttaatagaatggatatctaaagcagcgattctcgaatataggcttttaaccagcagaatcagcattacttgacccgaaaacttgttagaaatgcaaacacttaagtctcacccctaagctcctgattcagaaaatctagggttagggtttaactgtctgtgttttccttgtttttgtttgtttgtttgttttgycgttgttgtttgttttttgtkgttgttttgttttgtttttgagacagggtctggctgtgttgcccaggctagagttcagtggcacaatctcagctcactgcagcctcaacctcctgggctcaagcgatcctcctacaacagcctctgaagtcgttgggaccacaggtgcaccaccacgcttggctaatttttgtattttt

SEQ ID NO: 951 - DNA, 401 bp, Homo sapiens
atctaaagcagcgattctcgaatataggcttttaaccagcagaatcagcattacttgacccgaaaacttgttagaaatgcaaacacttaagtctcacccctaagctcctgattcagaaaatctagggttagggtttaactgtctgtgttttccttgtttttgtttgtttgtttgttttgycgttgttgtttgttttttgtkgttgttttgttttgtttttgagacagggtctggctgtgttgcccaggctagagttcagtggcacaatctcagctcactgcagcctcaacctcctgggctcaagcgatcctcctacaacagcctctgaagtcgttgggaccacaggtgcaccaccacgcttggctaatttttgtatttttggtagagacagggtttttcca

SEQ ID NO: 952 - DNA, 401 bp, Homo sapiens
accacaggtgcaccaccacgcttggctaatttttgtatttttggtagagacagggtttttccatgttgcccaggctggtcttgaactcctgagctcaagcaatcctcccaccttggcctcccaaagtgctgagatacaggcatgaagtcactgtgcttggcgttttaaccagcctgccagatgattctgaatttgaatatyctggtgagaggttttaaatcatgcaagtggctgtctgcctccagttaaggtaaaaagggaaaggcctcagcttacactgtggttgagccatatgacaggacatacaaacactattaatattactagagaagcaaccagcaccgttttgaatagctcagtctattgggggtgtgccttctactcaagatgtaaataaggat

SEQ ID NO: 953 - DNA, 401 bp, Homo sapiens
ttttcttaaggatcaaaattaaaaggtggaaatatacaaacgctaaataatggaattaagcattggccttggataacagaaggtgaaggagataagagacaactttctgttccagctccactttaaccacaggggacataaatatatgggaccttgtagtatttaaccttgttaatatctccatactgttttgcagtaggygttggaacagagcttcacatttttctggtggaggagccagtgatctctggatggtgaaaatattctctaaaacagactccacaactacaatgaccagtacaatgtgttttctatgccgctgtcctctgtcaaggggcatcacaagtggctggcctatattcatgtaaaggtagaactagamcccaatcaatgtgccctat

SEQ ID NO: 954 - DNA, 401 bp, Homo sapiens
catactgttttgcagtaggygttggaacagagcttcacatttttctggtggaggagccagtgatctctggatggtgaaaatattctctaaaacagactccacaactacaatgaccagtacaatgtgttttctatgccgctgtcctctgtcaaggggcatcacaagtggctggcctatattcatgtaaaggtagaactagamcccaatcaatgtgccctataaatacccaagtctttaaatacccttagataataaaggtaaaagatgcaagaaaaagaggactgggagagtggrccaagtttatagttctttcaaagtctatttgaattatttaaaaccattctttttttgttaatagattttaattctcatacatgtcacatgtttcttttgcagaattc

SEQ ID NO: 955 - DNA, 401 bp, Homo sapiens
agactccacaactacaatgaccagtacaatgtgttttctatgccgctgtcctctgtcaaggggcatcacaagtggctggcctatattcatgtaaaggtagaactagamcccaatcaatgtgccctataaatacccaagtctttaaatacccttagataataaaggtaaaagatgcaagaaaaagaggactgggagagtggrccaagtttatagttctttcaaagtctatttgaattatttaaaaccattctttttttgttaatagattttaattctcatacatgtcacatgtttcttttgcagaattcaaaacatttttaaaaacacccatttcaataatattgcatgcaaggtaaacaagaggttagaataactagtacaacataacgcagcttgactag

SEQ ID NO: 956 - DNA, 401 bp, Homo sapiens
ttgtgacttaatggtggcttgtggctccacttcccttgggggttgtttttgttgttcttctctcaggaccacatttattttgatgttttaaaagagaaagaaaagttccaaaaacttcctttctcgtatttcctctttgagatccagcaaaatttctacaactggccttttccagatggcttgcccagaattgctgagagwttgaggcacctcaagctctgggctcaacatcgaaggttctttaaatgtgccttttatcctttagtttctgtcacttgatgatgggtgaccaccctcatctctctctctctctctctcttttttttttttcctactaaacatgagattactggaaatatttcatgattggatacatgctattggttaatccatttaaccaa

SEQ ID NO: 957 - DNA, 401 bp, Homo sapiens
aaggggcttcccccttcacttggcactcactctgtcctgccccttgtgaagagggtgcctgcttctcctttgccttctgccatgattgcaagtttcctaaggcctccccagcagtgtgaaactgtgagtcaattaaacctcttttctttataaattacccagtctcaggtatttcttcatagcagtgtgagaacagactartacactcatcttttgaatacattatgtgaagtacaacaattttttccaaaccaaaccagacctggctaaatcctttactatagaccccaagattgagagagagggaaaaaggaattgatctgaatcaaatttgctgttatcaagaagtagggtagggaagggaccaatatgagatgtacgaaaattggctcccaaagtac

SEQ ID NO: 958 - DNA, 401 bp, Homo sapiens
aacatttttgctctcataacaatgctctgatgaacctcatgcattcatctttgagcttttgaccaattttccttctgtggtaaattcctgaaagtagaattgttgggacaaaagatttagagattttgtatctttaaacatattaccagtttgccaacccaaagggtcatatgagattactttctgcctacagtgtagtaragtgccagcttctcccaacaaccttgccaacgttgggtattgtcaattttttggctctttgccaagctgataggagaatggaatgtctaatggtttttgaattacattctgactgtgctgcatcagactgtaactgaatgcagttgtgatgtatcaggggacctggtttaactcagcacactgtttgaatctgtgtaata

SEQ ID NO: 959 - DNA, 401 bp, Homo sapiens
ttggtacttattgaaaagcagctattgttttaagtcctttgcatatacatttctatgatttactatatatcagtagcatttctccaacccatcttggctaggcaagcaccactgaatatgaaggaggccaaatagaatgatactatccaagctgcaaagaaacaaacaaaagaaaacatctaaatgcatgcctctttggartggcatttgcatccgttgccaatatccatagaacaaatgccttcaggcaggaagaagttgggataatgtcaatgtttttaatagctgtagtagagtcctatttagaaagcagtaattatctctccatattgattttttacatcccctcaataaatccagaagaaatgtgaagaccatctgtaagtgtgatttttaccagg

SEQ ID NO: 960 - DNA, 401 bp, Homo sapiens
atctaagagatctagagcccatattgcccacagagctgaaaacatatgtacatctaaccctttgcaggaaaaaacttgttaaatcatgattgagattatagtagtattatttctgattgactaggtagtaattggtcccagcatgtaaagtttctaatattaaagtcacacgatagaggagctagaggcttaagaaaagtrtacatgaatttatttatttggaataggaagggaaacatccctggtatcatcatgatggcatatagaggcagggctgagagctagaatacagaatacgtcctttgctagaaacagtttctcgggctgggttagagtgggtagaaactatggatcatcctgccgcaggtccaagtaaacaggatttggcgctctacataatg

SEQ ID NO: 961 - DNA, 401 bp, Homo sapiens
taaatatataacatccactgagtgttggccagcgttgactgggggttgttctccacatcacgtccctaagggaccaacagtgttggaggagtctctcttctcatattgatgttcaccatggcaaaggcaatgatcacagtgaaccacatgctacattttaagcttctacctggacaccacacaagtcacttccactcccakttcggtggtaaagcaagtcaattcaagtctgacttcagcatctttgggaaatataattccaccccrrgaggggaagcagatatgggtgaaatgtaataaaattcacctctcccataaagtcctagtagcattgttttatttgagtgaattcttttttttttttttcttccttacagatcctctttaaaacatcagcctgg

SEQ ID NO: 962 - DNA, 401 bp, Homo sapiens
taagggaccaacagtgttggaggagtctctcttctcatattgatgttcaccatggcaaaggcaatgatcacagtgaaccacatgctacattttaagcttctacctggacaccacacaagtcacttccactcccakttcggtggtaaagcaagtcaattcaagtctgacttcagcatctttgggaaatataattccaccccrrgaggggaagcagatatgggtgaaatgtaataaaattcacctctcccataaagtcctagtagcattgttttatttgagtgaattcttttttttttttttcttccttacagatcctctttaaaacatcagcctggaaacagtatctgtagaaatcagttttgttagttctaaagcagggcttcattgttgggatgtgttgt

SEQ ID NO: 963 - DNA, 401 bp, Homo sapiens
aagggaccaacagtgttggaggagtctctcttctcatattgatgttcaccatggcaaaggcaatgatcacagtgaaccacatgctacattttaagcttctacctggacaccacacaagtcacttccactcccakttcggtggtaaagcaagtcaattcaagtctgacttcagcatctttgggaaatataattccaccccrrgaggggaagcagatatgggtgaaatgtaataaaattcacctctcccataaagtcctagtagcattgttttatttgagtgaattcttttttttttttttcttccttacagatcctctttaaaacatcagcctggaaacagtatctgtagaaatcagttttgttagttctaaagcagggcttcattgttgggatgtgttgtc

SEQ ID NO: 964 - DNA, 401 bp, Homo sapiens
cagggtgagagtttggtggcacggagtgaggctagaggtgggcgtgtggagagtctgatatcctgatatcaaagcaattccattcagacttaggcctgagctgctcccagtcatccaagtcatttttactaatatctgacaacttgcaaatattgtgttacgttcaacactgaaaatgaggactgtgcatttccttttgtytaaatgatgattaaatggtgaagcagctacagaagtattgactaacgacagcatccatttactagaaaatatgtcatttgctactgcaaacatttatggtctgattatacctcatgttacactgcaatggtttgggttttttttttttttttgtatttttggtacatcagaaacacttttcccaatgtttgttagtttaa

SEQ ID NO: 965 - DNA, 401 bp, Homo sapiens
atgattaaatggtgaagcagctacagaagtattgactaacgacagcatccatttactagaaaatatgtcatttgctactgcaaacatttatggtctgattatacctcatgttacactgcaatggtttgggttttttttttttttttgtatttttggtacatcagaaacacttttcccaatgtttgttagtttaagcattgktcaacatttatttattaagcattgactttataaaataggtaccaggaatatgaaaatgagtaagatatgttccctgacatccagtagctcatagtctagagatgtcaccataataataactagcatttattggacaccacctgtgtctcctgaagcctgttacctcatttaattttgacaaaaccttatgaagtgaatat

SEQ ID NO: 966 - DNA, 401 bp, Homo sapiens
  misc_feature (1)...(401): n = A,T,C or G
attctttgaaatctgaaataagtcctaaccttatacattcaccaggagtgtgtattaatcacttctcacactgctgataaagacatacctgagactgggtaatttataaagaaaaagaggtttaatgaactcacagttccacatggctgggaagacctcacaagcatggtggnaaagtgacaggcacatcttacatggcascaggcaagagagaatgagagcaaagcaaaagggaaaacaccttataaagccatcagatctagtgagacttattcactaccacgagtattgtgttgagggaaaccacccccatgattcaactgtcttccaccaggtccytcctacaacacatgggaattatgggagctacaattcaagatgagattcagatgggaacacag

SEQ ID NO: 967 - DNA, 401 bp, Homo sapiens
  misc_feature (1)...(401): n = A,T,C or G
ccacatggctgggaagacctcacaagcatggtggnaaagtgacaggcacatcttacatggcascaggcaagagagaatgagagcaaagcaaaagggaaaacaccttataaagccatcagatctagtgagacttattcactaccacgagtattgtgttgagggaaaccacccccatgattcaactgtcttccaccaggtccytcctacaacacatgggaattatgggagctacaattcaagatgagattcagatgggaacacagccaaaccatatcagagtgtatactttcattttattcctcaatcttcattccttaagttttcaacaaataatttgcttttgaaaggattaggagcttaagttggctttatagttatccagtaaccttttgatttctcca

SEQ ID NO: 968 - DNA, 401 bp, Homo sapiens
actatgttttcagtaggacatatctgatggaaatacatttcttttgatattatttattataactggtgagctacattccacccaatagtaaatgcctctcagcaaaaagatagatacttttgatagttaatatattcagatattatgttgtttgtggaaaccataacttaataaattttaaaacagtgtcttctttaaaartaattttttattaaactttgtattttgaggtaattgtagattcacatgcagctataagaaataatgcaaacaatactttttacccagtttcctccaatggtgacatcttgaaaactatcgcacaatagcacaactttgatattgacactgatacaatcaagatacagaacattttcatccaggcatcccctgtgcttagc

SEQ ID NO: 969 - DNA, 401 bp, Homo sapiens
ctataagaaataatgcaaacaatactttttacccagtttcctccaatggtgacatcttgaaaactatcgcacaatagcacaactttgatattgacactgatacaatcaagatacagaacattttcatccaggcatcccctgtgcttagcccttttgtagctacgtctacttcctttgcccaccctcaccttaaaaccctgscaataattaacattttgtcatttcaagcatgttatataaatggaaccatagagtatataactttcaggtattggttttttccaatcagcataattctttggagattctttacttagcatacttctctggagatttatctaggtgcttgtgtactagtagttcattctttgttatcgctgcatagtatttcatgctaggga

SEQ ID NO: 970 - DNA, 401 bp, Homo sapiens
tccacaaggcaagagcttttaattttgataaaaataactttttatacttaattggcaaccaaatacctaaatgtcttttgatagaaaaacttgtcctagataatgtaaaatcattttacatattcacagatccatctccactaatgtcatataagtttaaaaatcacaaagtaatttgaacagattcctaaattataaatyagttaacagttattttttgctctaatctttagttgtacatttacttcaaataaacatttgttaaaaacgtactctgtactgaggaatgaggatacaaaactcataatttgtcatttctttgcttcagggacttacattttactggattacatctaaatttttatttggcagttttattccaggaagatcatgacagtctt

SEQ ID NO: 971 - DNA, 401 bp, Homo sapiens
gactgaatcagttcaaagagcctcgatagctttaaatgtctgtgattgatttttctgcagagcaagatcaaacaaaacagtatttcctagctgctgcccttacatgtagtggtgattcacagagaatttggggaggaaagtagccattatgggatgttttgcaaaaggcaataccaagattgatcatcacctgagggcgayacactatagttgttcctctgtatccatgacagattagtcccaggaccccttgcagataccaaaatccacagatgctcatgtcctgcttataaaatggcatagtatttgtacacagccttgtatatcctcctgaatactttaaatcatctctagattacttataatacctagagttgtataaatgctatagaaagtattgt

SEQ ID NO: 972 - DNA, 401 bp, Homo sapiens
aaacaaacaacaatgatactggccaactgacttctctcacttctctcttctcttttctttaattcattccttacctatttagaatagctgaggctcatttttatcttcttatgacagccagaattgtcatctattaagattaagtaaggaaggcataattgatattcacaaaccaccccaggatttatcagaagtgagggwgtttcatatggattactaattgtctaaaatttggctctaagcacctgaagatcactaggcaggagagaagagtagggtttgttgtacatgagaagaggctgtggggtgggggatgttcaccgagaagactgctttggtctttgatactagcatttttccttctatatggttaacaaggcacatattttcatttttatatc

SEQ ID NO: 973 - DNA, 401 bp, Homo sapiens
tgtggggtgggggatgttcaccgagaagactgctttggtctttgatactagcatttttccttctatatggttaacaaggcacatattttcatttttatatccccagaataaaggcttgaaaggaaacaaaatctcaaataaatggactaatttgttaaattctggactaaacctcagtttattttaacagctttaacaackgtctctggagctcataacacatatagagcactattggtgtcacacaaaaccttgaaatcagaattgccacagaccgaatctgatctgaaatggcatttcattcaactgcagctttgtgtcacaagaacctgtctctgttttcctaacatgggtatgatgcatattcagaagcagccgagtgatttacttcttttttcatt

SEQ ID NO: 974 - DNA, 401 bp, Homo sapiens
ggctggtcttgaactcctgacctcgtgatccacctgcatcggcctcccaaagtgctgggattataggcataagccaccttgcttggccctaaaatacttttaataagattgtctcatccttctcttggttttccaatggaaatggtggtatagcaagtccatctgaaacacttctgcaaaataacaatgaagctaatcacygtgggaaacatttacatcatatgtatttgcatacagaggaaattgataatcttgagacatcagcatactagaatagcaagagacatgttttattctattatattctcttagtcagcaatktttaattgttgcttaaaggaaactgaataaaacgtgggcgcagtggctcycacctctaatcccagcactttgggaagttg

SEQ ID NO: 975 - DNA, 401 bp, Homo sapiens
tctcttggttttccaatggaaatggtggtatagcaagtccatctgaaacacttctgcaaaataacaatgaagctaatcacygtgggaaacatttacatcatatgtatttgcatacagaggaaattgataatcttgagacatcagcatactagaatagcaagagacatgttttattctattatattctcttagtcagcaatktttaattgttgcttaaaggaaactgaataaaacgtgggcgcagtggctcycacctctaatcccagcactttgggaagttgaggagagaggatcgcttcagcccaagagtttgagaccagcataggcaacatagtgagaccccatctctacaaaaaatattttttaaaattagtcgagcatggcggtggctccctgtagtt

SEQ ID NO: 976 - DNA, 401 bp, Homo sapiens
cttctgcaaaataacaatgaagctaatcacygtgggaaacatttacatcatatgtatttgcatacagaggaaattgataatcttgagacatcagcatactagaatagcaagagacatgttttattctattatattctcttagtcagcaatktttaattgttgcttaaaggaaactgaataaaacgtgggcgcagtggctcycacctctaatcccagcactttgggaagttgaggagagaggatcgcttcagcccaagagtttgagaccagcataggcaacatagtgagaccccatctctacaaaaaatattttttaaaattagtcgagcatggcggtggctccctgtagttccagctacatggagggctgaggtgggaggatcacttgaaccagggaggtc

SEQ ID NO: 977 - DNA, 401 bp, Homo sapiens
tagaacattattttaaagtttaggtatttcatctgagtatattactctggctttcctaagctagcttagttatatatgttcacttcagtttgagtctccactaaattttaacatgaacaaaatattatatgcaacaccatagaagcaattgttaaatcattgttacttttaatatcacctaaatctaacctaagtaaatgygtttatttttattaccaactgatgtagatatacccacatggacagaaaacagcataaaccaccaaaaggacttgaaaattccctcttcaagacttcttttgccaatgactaatgtttaatgctatttgctagagattctggtgccaggaggatttctaaccaggttattttatcaataggaataaaatatcgagggctta

SEQ ID NO: 978 - DNA, 401 bp, Homo sapiens
cacatggacagaaaacagcataaaccaccaaaaggacttgaaaattccctcttcaagacttcttttgccaatgactaatgtttaatgctatttgctagagattctggtgccaggaggatttctaaccaggttattttatcaataggaataaaatatcgagggcttaaattagtgtaatctctcaagatcttgaatttgacrttttcataatttttacttaatcatagctcctggggattggaattactcttttagctggcccgagtctgggaggaggatccaaagtctttgagttgttttcttttatttctttttagcccctaaagcactggaaatggttggccctgaagtgctcctaaggtaaccgcaagatgaggcaaaacaggattgagatgaaaacc

SEQ ID NO: 979 - DNA, 401 bp, Homo sapiens
gcctgggcaacagagcaagaccttgtctcaaataataataataatatataaataaacaaataaataaaattatcctaagtgaaatcagttgttgatagaactgaagtacatcaagcctagtgggactgtggttgtctctccagcctaaaaaaaaaaaagaacaaaaacaacaacaaaaaaacttaactccaaaattgctgytgctccatttatttcaggtgtaagacttctttgagatttaaaaacaatataatcatttacaatgtactttgttggacctaagcataggaaaattcattcattcattcattcattgagtacctgttatatgccaggcaatgcactaggcaccatcaaagatgaataagctatgtgctaaaattcacagtctaacagaagaa

SEQ ID NO: 980 - DNA, 401 bp, Homo sapiens
gtcaccacacctggctattttttgtattttttgtagagatggagtttcaccatgttgcccaggctggtcttgaactcctaggctcaaatgatcctcctgcttccaccttccaaagcgctgagattatagacgtgaaccactgcacctggtctagaaattatttaataataaaaaaatgaagacagaattcaatgaagagcrtagaagagtctcttaaacctytgttttaagctatgagccaggaaagagatggtggcaagggtgagatggttgcagtgcttttttgttcacttatctcaggcctgtgtgttctgagttaaagacaagtcagttggcaagagaaggagagaggaagcttcccagaaccatttgaaggaaaatttggaaagtcttctctaagg

SEQ ID NO: 981 - DNA, 401 bp, Homo sapiens
ttgtattttttgtagagatggagtttcaccatgttgcccaggctggtcttgaactcctaggctcaaatgatcctcctgcttccaccttccaaagcgctgagattatagacgtgaaccactgcacctggtctagaaattatttaataataaaaaaatgaagacagaattcaatgaagagcrtagaagagtctcttaaacctytgttttaagctatgagccaggaaagagatggtggcaagggtgagatggttgcagtgcttttttgttcacttatctcaggcctgtgtgttctgagttaaagacaagtcagttggcaagagaaggagagaggaagcttcccagaaccatttgaaggaaaatttggaaagtcttctctaagggagttgccctcaactaccttt

SEQ ID NO: 982 - DNA, 401 bp, Homo sapiens
aattataatttttctcaaacttcccaaaagtggaacattgtgggaaataatatgggagtggacatttgaatttctgtttgactttgcagcagaaatctcttttctaactctctctttcaatctcaccatcagagccatctgattgcttgataacatgattctttttgcccagcccttgttatcctccctcctgccctagtmaccatgacataggctccactcatttctacctaggaacctggatgcactgctttgcactattgcctcctggcaaaacagggcaatgagaaaggaaatggaagcccaaattcagagccctccttcccagcacaagaatgaggagatgccctttttccccggggagggggattcttccctctctcttcagtaattgtctttat

SEQ ID NO: 983 - DNA, 401 bp, Homo sapiens
ttttttgacatgtattatttgatgaaaccctatgagattaggtctttacttccgaaagaagaaaaccaaattcaagggcaattaaaaacttgtcaaatgtctcaattttagtaagaaaaaaaaccgacattggcctagatcttaatctgtgcccagtcctcttcccatccctctttttttttttttttttttttttttggkgggctgctctcaaatttttgggctcaaatgaacctcctaccttggcctcccaacgtgctgagattacaggcatgagccaccgtgcctggccagctaaggttaatttagtattgaaraaatatttttgttatgaatttagtgtagccaagtgtgcagtgtttaraccatctacagtaatgcacattaatggcctaggcctt

SEQ ID NO: 984 - DNA, 401 bp, Homo sapiens
aaaaaaaccgacattggcctagatcttaatctgtgcccagtcctcttcccatccctctttttttttttttttttttttttttggkgggctgctctcaaatttttgggctcaaatgaacctcctaccttggcctcccaacgtgctgagattacaggcatgagccaccgtgcctggccagctaaggttaatttagtattgaaraaatatttttgttatgaatttagtgtagccaagtgtgcagtgtttaraccatctacagtaatgcacattaatggcctaggccttcacattcactcaccactcactcactgactcacccagagcaatgtctagtcctgcaagctccattcatgggaaaggcctcacacatgtataacatttttttgtcttttattctgtat

SEQ ID NO: 985 - DNA, 401 bp, Homo sapiens
cccatccctctttttttttttttttttttttttttggkgggctgctctcaaatttttgggctcaaatgaacctcctaccttggcctcccaacgtgctgagattacaggcatgagccaccgtgcctggccagctaaggttaatttagtattgaaraaatatttttgttatgaatttagtgtagccaagtgtgcagtgtttaraccatctacagtaatgcacattaatggcctaggccttcacattcactcaccactcactcactgactcacccagagcaatgtctagtcctgcaagctccattcatgggaaaggcctcacacatgtataacatttttttgtcttttattctgtatttttctatgtttagataagtttagatgtataaatacttatccttgta

SEQ ID NO: 986 - DNA, 401 bp, Homo sapiens
gagtgcaatggtgcgatctcggctccctgcaaactctgcatccggaattcaagcgattctcctgtctcagcctcctaaatagctgggactacaggcacgcaccaccacgtccagctaatttttgtatttttagtagagacggggtttcactatgttggccaggatggtctcgatctcttgacttcgtgatcctcccgcctyggcctcccaaagtgttgggattacaggcatgagccactgtgcccggcctcatgtagagcactttaaaagtacattggatccatagtaatcacttaactatgaacttgtatatccatatcaaaacttcatgttgtacagcttaaatatagacaataagaataaaataaataaatgaaaatattttaatatgctgagccatg

SEQ ID NO: 987 - DNA, 401 bp, Homo sapiens
taccatacatatactgatgacacctaacactctagttctcgtctgtgtctccctgaactccagactcgtaggtccaactgacttctgcatatggctgtccagtcggcatctccaattgaacatcgtcagaacaaaacttcaggcttttccccaaccagctcttctggtcttgcccatctcaataaacaccactgctatctrcccaattaattgagccggctatctggtagttattcccttctttgcctcactgtcttctgatccccatatcctataaactctaataccaagtatccctggaatcctttcagtttttcctatctttacttcttctccttagtctaagctattatactctcttgcatagtttagcggtagtttttaagccctttttttatttt

SEQ ID NO: 988 - DNA, 401 bp, Homo sapiens
ttccaagagcacaatacagcaaaaagtgagagttatctatttctcccttcttcatccgaatacaaaatacatcctattttactgctttttttttgtcttttgcctctactttaagacttatctaagaaataaagaaaagccaaccactcgttctatccacagaagaaaaacacacaccagcatagacaacacaaaagactrtgtctagatgttaagactatatatcctataggactataattttcatagatctaaaaagtgagaaacatatatatgtataaaattatgtgggatgcaagttactgagattttgaatatggggctctgtcatttaccctaaaatgttcagtggtcttttctattttttctctattctcagtaaaatagaactttctcaacaa

SEQ ID NO: 989 - DNA, 401 bp, Homo sapiens
tcaaaggggaatttattaacaattttatttctgagaggatatgacaacaacaaagacattaataaaaaacaccagcgagctttctggcaatatgtattaaaattttcaaaaacacttatactctcgaatccagcagttattatttcgggaaattgctctaagaatattatctttttatacaaagcattttctgaagagaaktattcaggaaattttcatttatgaacagaaaaagtccaacattatggaaatagtgatataaaatacagcatatatagttctttggtattttacagtcatgtaatcatggagagaaatacttcagataaattaacataataaaccacaatacaaaaaagtatatttacaatagaaaaaaagtttaaaagtgtgttagcaat

SEQ ID NO: 990 - DNA, 401 bp, Homo sapiens
tttcttcaaagtaaaatgaagtggttaaacaggattactccccagatgtctccccaaactttacactggtgtaataattgtttgcaaggatcattgggtgattatgtctaaaagcctgcagttattagtcctcatatcaggaatgtgctatccccattcattttattgtagaacctggtttgctgtgggatagttgaaatwtgaagaattcacttggtcagtgtgtttcacggccttgctactttttctgcttggatggactcacttctctatatgattttctctttaaatcagaagtatttgacctgaagcagtaactcctctattcatataatagtgatattctgatacatatgtgaatattataaaaataagtagaatgataatattattactaatat

SEQ ID NO: 991 - DNA, 401 bp, Homo sapiens
atataaacacaaagcaacataggagaaaagtactagttacatgcccatggcaagaaaatatgcctgaaatggttctgtttattttgttgttgttgtttctgcttggaatttcagcagttatttggcaaagtgattagctagctgggaaggaagaaagctcgtctccatcagccttttgtcagagcccgccttttggtcccrgagcccccatgaaagtgtgctgtagaccaggaccactgttgccctgaatgcatgagtatgcagcctttttatcgtaggcttgtcatctcctgagttctgcaatagatgccatgtgaaatccagtatatactcagtctaacacatagctgctgcataagaaaatttctttccatgcttaagcaatttctgcatagagctta

SEQ ID NO: 992 - DNA, 401 bp, Homo sapiens
aagtcacaagtgggtgagaaccacaggagagaaacagtcagagggtgatgacagccagaactggtatgatgtgaaaggtcaatgacatcagaaacggcctcagggattttatagcctggctccttcaatttcagttcttggtataggccagcttttcaggactgttgattgtccctcttctttgtgtgaaattcctagtgsacagagcttctgcagtgcctcttaggtactttgaaaatcccaacgataaacatctggacccaacacagaagcctccaggaagctgtcttgttggcagtcacctacgagcaggcgataaacacaacacattaaatagtatgtaatgctccagggattgcagtcctctgcctcctaatctctctgtcctttcctcttttatt

SEQ ID NO: 993 - DNA, 401 bp, Homo sapiens
gagcttctgcagtgcctcttaggtactttgaaaatcccaacgataaacatctggacccaacacagaagcctccaggaagctgtcttgttggcagtcacctacgagcaggcgataaacacaacacattaaatagtatgtaatgctccagggattgcagtcctctgcctcctaatctctctgtcctttcctcttttattgacytgtcaggagcatgacasttgtgcacaaccattagcacacaagaaatgactttcctgtgggggtgatggggactggggaacctactctttgagatagaaagttaccctgatgcagaataattacagtccagcttagcctccttataagcgattaatcttacttttcctcttagcttctgtctgtttgtaacctgaggttga

SEQ ID NO: 994 - DNA, 401 bp, Homo sapiens
cttaggtactttgaaaatcccaacgataaacatctggacccaacacagaagcctccaggaagctgtcttgttggcagtcacctacgagcaggcgataaacacaacacattaaatagtatgtaatgctccagggattgcagtcctctgcctcctaatctctctgtcctttcctcttttattgacytgtcaggagcatgacasttgtgcacaaccattagcacacaagaaatgactttcctgtgggggtgatggggactggggaacctactctttgagatagaaagttaccctgatgcagaataattacagtccagcttagcctccttataagcgattaatcttacttttcctcttagcttctgtctgtttgtaacctgaggttgaccgaagttagttctttt

SEQ ID NO: 995 - DNA, 401 bp, Homo sapiens
agatagaaagttaccctgatgcagaataattacagtccagcttagcctccttataagcgattaatcttacttttcctcttagcttctgtctgtttgtaacctgaggttgaccgaagttagttcttttagttggttcttgagaaaaccctttcagtctgtatttccaggaataaatcttaactctaatttaaaaaacaaaarggccctataaatagttacttcaaaccctttaatttatagctgcattctcaatgtcttcatcctcccaaaatcactcacctctacatttttgccctaagtacctaggttagcacaacttttcacaacttctctttaacatttctctgaataacgtgaaccttccttatttccttaaaatataaacttatatatgttcttcc

SEQ ID NO: 996 - DNA, 401 bp, Homo sapiens
ttggaagtgtctcttcttttggaagtgggagaccaagtggaggggaagaacatgaacaagggattgaagccattgagaaagtcatttattcattcgatagatatcttctgagcactgcgctaggacctaaggacagaataatgaaggcagagtttatccttccactagcacagcagtcaaaaccaataggaattaagattrtcagaagtgacaaaactgtacatagacctgttcacataactaacaagggaaacgatggaggtgatrtggaagtctgaacgtggtgcaggaataactcagccaacatccccctcctttgggaaatttagatagatgtaggtagattgagaagtgatataacagtcatgtggcatcattgagagagtcagttttctataatg

SEQ ID NO: 997 - DNA, 401 bp, Homo sapiens
aagccattgagaaagtcatttattcattcgatagatatcttctgagcactgcgctaggacctaaggacagaataatgaaggcagagtttatccttccactagcacagcagtcaaaaccaataggaattaagattrtcagaagtgacaaaactgtacatagacctgttcacataactaacaagggaaacgatggaggtgatrtggaagtctgaacgtggtgcaggaataactcagccaacatccccctcctttgggaaatttagatagatgtaggtagattgagaagtgatataacagtcatgtggcatcattgagagagtcagttttctataatgacaaagacatggaaagagagatgtttagtacatgtacagcagaaggagttgattcacaacgcaatg

SEQ ID NO: 998 - DNA, 401 bp, Homo sapiens
agcagggttattattaaaactctgatcccccaagtccaactgaaggggctccagtcactaccccatcatctcagtggtgagatgtagtcaaggcatctaacctctctgcctcagtttcctcatatgtaaaatagagacaatcattataaagtgtttagcagaatgccagatccacagtaaatatcagtaaaaggaaatttrtaaatttgtaaattgttagggaatggggtgagaccctcaagattctaatcttcaagggaaagaggatgctaaggaaagtcagaggaagcccgagaatcctaagagaggatgatacaagcaaattaattaaggaataagatcaaagaatattgggaaatgtttaatccacttggtgtgggaaaaggacttttwtgtttgtt

SEQ ID NO: 999 - DNA, 401 bp, Homo sapiens
ggaaatttrtaaatttgtaaattgttagggaatggggtgagaccctcaagattctaatcttcaagggaaagaggatgctaaggaaagtcagaggaagcccgagaatcctaagagaggatgatacaagcaaattaattaaggaataagatcaaagaatattgggaaatgtttaatccacttggtgtgggaaaaggacttttwtgtttgtttgtttttgagacggagtcttgctctgtcgcccaggctggactgcagtggtgcgttctcggctcactgcaagctccgtctccctggttcaagcgattctcctgcctcagcctcccgagtagctgggattacaggcgccagccacaacgcccacgcccagctaattttttttttttttttttttgtagtagaga

SEQ ID NO: 1000 - DNA, 401 bp, Homo sapiens
ccgcccgcctcggcctcccgaagtgctgggattacaggcgtgagccactgagcccggccgaaaaggactcttttttttttttttttacacagagtctcgctctgttgcccaggctggagtgcagtggcgccatctcggctcactgcaagctccgcctcccgggttcacgccattctcctgcctcagcctccagagtagctsggactacaggcgcccgccaccacacccggctaatttatttatttttttctttttttcttttttgtatttttartagagacggggtttcaccgtgttagccaggatggtctccgtctcctgacctcatgatccgcctccctcagccttccaaagtactgggattacaggcgtgagccaccgcgcccgaccatgaaaaggac

SEQ ID NO: 1001 - DNA, 401 bp, Homo sapiens
tttttttttttttacacagagtctcgctctgttgcccaggctggagtgcagtggcgccatctcggctcactgcaagctccgcctcccgggttcacgccattctcctgcctcagcctccagagtagctsggactacaggcgcccgccaccacacccggctaatttatttatttttttctttttttcttttttgtatttttartagagacggggtttcaccgtgttagccaggatggtctccgtctcctgacctcatgatccgcctccctcagccttccaaagtactgggattacaggcgtgagccaccgcgcccgaccatgaaaaggactctttttaacctcttctccatgtctaatctgagtttcaacctttttattcttattctgttataagtacttctc

SEQ ID NO: 1002 - DNA, 401 bp, Homo sapiens
tgtgtttgctggtactgaatcctaccctaatacttccgaaatgaacctcattggataactcaactcttcattatgtttttgctaatcttttaggagcctttttgcaacccaccgtctccctaccctcgttgggtctttttttttttcttcttcagtcagggttttgctctgtaacccagtggggaaagtggcatgatgatrgctcactgcagccycaaattcctggactcaagctattttcccgccttaccttcctgagcagctgggactataggcgcatgccatcatgcgtggctaatttctaaaaaatatatatttttgtagagacatctctctatgttgcatttctggtcttgaactcctaggcgcaagcaatcctcccacctcagcctcccagagtg

SEQ ID NO: 1003 - DNA, 401 bp, Homo sapiens
ctgaatcctaccctaatacttccgaaatgaacctcattggataactcaactcttcattatgtttttgctaatcttttaggagcctttttgcaacccaccgtctccctaccctcgttgggtctttttttttttcttcttcagtcagggttttgctctgtaacccagtggggaaagtggcatgatgatrgctcactgcagccycaaattcctggactcaagctattttcccgccttaccttcctgagcagctgggactataggcgcatgccatcatgcgtggctaatttctaaaaaatatatatttttgtagagacatctctctatgttgcatttctggtcttgaactcctaggcgcaagcaatcctcccacctcagcctcccagagtgctggggattgcagg

SEQ ID NO: 1004 - DNA, 401 bp, Homo sapiens
gtggcgcgatatcaactcactgcaacctctacccctgggttccagtgattctccagcctcagcctcctgattagctgggattacagacacccgccatgacaccctgctaatttttgtaattttagtagagacagggtttcaacatattggtcaggctggtctcgaactcctgacctcaggtgatccacccaccttggtctytcaaagtgctgggattacaggtgtgagccacygtgcccggcccttggcctttattcyttattttccctgatattaatccctaatgaaatgcatttagtacacattcatctttttaaaatgtgcagtttttgtcacagaagtagtgtaaaggacaccagaatggttggaagacgatttttgtggtcttctacaagtcctgt

SEQ ID NO: 1005 - DNA, 401 bp, Homo sapiens
ccctgggttccagtgattctccagcctcagcctcctgattagctgggattacagacacccgccatgacaccctgctaatttttgtaattttagtagagacagggtttcaacatattggtcaggctggtctcgaactcctgacctcaggtgatccacccaccttggtctytcaaagtgctgggattacaggtgtgagccacygtgcccggcccttggcctttattcyttattttccctgatattaatccctaatgaaatgcatttagtacacattcatctttttaaaatgtgcagtttttgtcacagaagtagtgtaaaggacaccagaatggttggaagacgatttttgtggtcttctacaagtcctgttttggtgactctgagcaagtcttaaccttgcc

SEQ ID NO: 1006 - DNA, 401 bp, Homo sapiens
ctcagcctcctgattagctgggattacagacacccgccatgacaccctgctaatttttgtaattttagtagagacagggtttcaacatattggtcaggctggtctcgaactcctgacctcaggtgatccacccaccttggtctytcaaagtgctgggattacaggtgtgagccacygtgcccggcccttggcctttattcyttattttccctgatattaatccctaatgaaatgcatttagtacacattcatctttttaaaatgtgcagtttttgtcacagaagtagtgtaaaggacaccagaatggttggaagacgatttttgtggtcttctacaagtcctgttttggtgactctgagcaagtcttaaccttgcctacatttcctcacatttagggcaag

SEQ ID NO: 1007 - DNA, 401 bp, Homo sapiens
accagaatggttggaagacgatttttgtggtcttctacaagtcctgttttggtgactctgagcaagtcttaaccttgcctacatttcctcacatttagggcaagtgtactcttcagggtcaactgcaatatctgtgggagtgctttgtgttttgtagcatgcatcttactagtgcttttgttgttgtttgcgttgtcgtgygggttccccacctcccccataacactgtaaagaaatgctgagactaagtggtagggagtggcagccatctggtgaggatggaaagttaatatctttatttatgtaataaacctccctttagaattctgttactgtcaaatttctcctggaattctaatagtattttcgctatgtgttttgaccttttgctattgggaaga

SEQ ID NO: 1008 - DNA, 401 bp, Homo sapiens
ttatgatttccgcagacttaaatcaaccctgggcttctatccttatactagttttattttatgttttttgtttgtctttagagaaatgatcgtgttctgtcatccaggctggagtgcagggacataatcacagctcactgcagcctcaaactcctgggctccattgatcttcctgcttcaacctgctgagtagctaggacyacaggcacgcaccatcaggcccaactacatttttaaatttttttctagagacgatgtctcgccatgtttcccaagctggtcttgaaccctggcctcaagcaatcctcccacctcagcttccctaagtaccaggattacaggcataagccactgagcccagccccacccttacatgttttctcttggcatcctgatccctg

SEQ ID NO: 1009 - DNA, 401 bp, Homo sapiens
gtttcccaagctggtcttgaaccctggcctcaagcaatcctcccacctcagcttccctaagtaccaggattacaggcataagccactgagcccagccccacccttacatgttttctcttggcatcctgatccctggacacaaccccattgagatacccttccatttaatacttttcttagtcatttaccaaatgtgtttayagtaatatattcccatatatttgtggcagagtacagcactcatataaattttgatgaacacagacatgctgtcccatacttgtaggtaaaacaatcatgtgaaattaaaataaatattttgtttagatagatcttgactatcatacacttattctaacaatattgcccattcctcaaaacattctgggaactccttgaaa

SEQ ID NO: 1010 - DNA, 401 bp, Homo sapiens
gtttatttatgcaaagcacataggatcataggattgctctctaggagaatggagtaattaataccatgaagactcatagacaatgcttcctcccctagaaactcattatttttcgaattttggcactgatctttcctgcctacttcctggcttttactaccttgtgaaaaagccccaagtgttagaagcagcttccccagyttactgccatcccttctaaggtccctggacaccactgcttgtctcctaccttagaaagtgcctacttggccaggcacgctggctcacgcctgtaatcctagaactttgggaggctgaggcaggaggatcacgaggtcaagagatcgagaccatcctggccaacatggtgaaaccccarctctactaaaaatacaaaaatt

SEQ ID NO: 1011 - DNA, 401 bp, Homo sapiens
gtgttagaagcagcttccccagyttactgccatcccttctaaggtccctggacaccactgcttgtctcctaccttagaaagtgcctacttggccaggcacgctggctcacgcctgtaatcctagaactttgggaggctgaggcaggaggatcacgaggtcaagagatcgagaccatcctggccaacatggtgaaaccccarctctactaaaaatacaaaaattagctgggtgtggtggggcatgcctgtagtctcagctacttgggaggctgaggtaggagattcacttgaagccgggaggtggaggttgcagtgacctgagatcacgccactgcactccagcctggtgacagagagagactctgtctcaaaaaaaaaaaaaaaaaaaaaaaaagtgccta

SEQ ID NO: 1012 - DNA, 401 bp, Homo sapiens
gggtagagaaagtattacatatctgcatgtgtggatgtgaaggacacacagatacataaggtaaatgagaatttattataaaggtgtatttgacaaaaattggggaaaaaaggaaaattggagaagatatctttctgtgagattaaagacaaataggggaaaaaagggaccaatgacaagaattagagcaaggtatgtaawgaattccagagctggctctaagagatagagcagctggtcatatrtgaaagggatgattcattcttcaggggctatccctcgtgatcctatttccttgcacaagctatcagttaatttattgattcacctcctttatgtgctcataggcatcaagaatacaatggatcacatacaattacagaaaagtttcatttcaggag

SEQ ID NO: 1013 - DNA, 401 bp, Homo sapiens
cacacagatacataaggtaaatgagaatttattataaaggtgtatttgacaaaaattggggaaaaaaggaaaattggagaagatatctttctgtgagattaaagacaaataggggaaaaaagggaccaatgacaagaattagagcaaggtatgtaawgaattccagagctggctctaagagatagagcagctggtcatatrtgaaagggatgattcattcttcaggggctatccctcgtgatcctatttccttgcacaagctatcagttaatttattgattcacctcctttatgtgctcataggcatcaagaatacaatggatcacatacaattacagaaaagtttcatttcaggaggtcaaacaggaagtttctttctgacttatattgaagtactcatg

SEQ ID NO: 1014 - DNA, 401 bp, Homo sapiens
ttcatttcaggaggtcaaacaggaagtttctttctgacttatattgaagtactcatgatgacaatggagaaaaatgaacataatcttttatgggtggggaccatgtgatctcttttctttcaagctccagagggtttataagacatttccatgttcaatttgattccggaaattatatgttgggtagaacagactcttttyggcaactcatgagaattgccaatgatcccagcatttgctactcttgatagtaattcccttcatttcctccatttttatacatgacctgcagtaaatattgacagttactttgctggaaagaataacacagagacagcttttcttaagctccaaactgaatttcgtggttaattgattggccagctggccctgccgtctct

SEQ ID NO: 1015 - DNA, 401 bp, Homo sapiens
tgggaggcagcaaatgcccaaatggaagacaatgtatgtagatcaaagaagccgatgagacagagagttcataaaatgtgaatacaattccaggggagaattgatgattatggaagcagaaagccaattgagttaaatattcattccagcaacaagtctgatcgtctcactgggacctgtgcctttccgaagtttcctcakcttttcaaggtctacacaaggaaagaacaaagccatcaaggaggctctcattctggaaagccggctgcaagatggcatgaaccagaggtcagcggccaccactgagagttcatcgtattcgcctctgtaaagaataagcctcaagcagtggttctgcaggagcggttcagcatcatcaataccaatgagccctaatgaat

SEQ ID NO: 1016 - DNA, 401 bp, Homo sapiens
aagaatttgtcagggtcccagtccctgtaccttatgggagaattaaattcattaaactgggccagatgtggtggctcacactggtaatctcagcactttgggaggctgaggcaggtggatcacctgaggtcaggagcttgagaccagcctggccaacatggtgaaaccccatctctactaaaaataaaaaaaattagtcargcttggtggtaggtgcctgtaatcccagctagtcaggaggctgaggcaggagagtcgcttgaacctgggaggcagaggttgcagtgagccgagatcgtaccactgcactctagcctgggcgacagaatgagactcagtctccaaaaaataaataaataaattcattaaactgaacaaattgagcccaatttatttgtcat

SEQ ID NO: 1017 - DNA, 401 bp, Homo sapiens
ataatttattctcattattttttgtttgttttttgagacagagccctgctctgtcatcagtctggagtacagtggcgcgatctcagctcactgcaatccctgcctcctgggttcaagtgattcccctgcctcagcctcccgagtagctgggactacaggcatgcatcaccatgcccagctaattttttctattttggcagrgatagggtttcaccaggttggccaggatggtctcaatctcctgaccttgtgatgtacccrccttggcctcccaaagcgctgggattacaggtgtgagccaccacgcccagcccattcttgtttcttggtaaaggaaaatccaactatatatatcttctttaggatcacytaaagacccatacagatctgtcaaatagaca

SEQ ID NO: 1018 - DNA, 401 bp, Homo sapiens
tctggagtacagtggcgcgatctcagctcactgcaatccctgcctcctgggttcaagtgattcccctgcctcagcctcccgagtagctgggactacaggcatgcatcaccatgcccagctaattttttctattttggcagrgatagggtttcaccaggttggccaggatggtctcaatctcctgaccttgtgatgtacccrccttggcctcccaaagcgctgggattacaggtgtgagccaccacgcccagcccattcttgtttcttggtaaaggaaaatccaactatatatatcttctttaggatcacytaaagacccatacagatctgtcaaatagacatccaatattttggtaggctttgaaaggaggtgcaaaaggatgagaaggaatttagggaga

SEQ ID NO: 1019 - DNA, 401 bp, Homo sapiens
catgcccagctaattttttctattttggcagrgatagggtttcaccaggttggccaggatggtctcaatctcctgaccttgtgatgtacccrccttggcctcccaaagcgctgggattacaggtgtgagccaccacgcccagcccattcttgtttcttggtaaaggaaaatccaactatatatatcttctttaggatcacytaaagacccatacagatctgtcaaatagacatccaatattttggtaggctttgaaaggaggtgcaaaaggatgagaaggaatttagggagatcattatctgaatcattgaacaaatgctccttaagcacctggtgaagagaggctactgagaagcagagcacgtggtcccagcctacgaggtgacaaagtaaaatggcag

SEQ ID NO: 1020 - DNA, 401 bp, Homo sapiens
gtcaaaggatccaaagtttcagttagacagaaaaaataaacttcagtgatctattgcacagcatggtgaccacagttaaaaataatgtatggtacatctccaaattgcttaaaaaaaaaaaaaaggtttcaaatgttgtcaccacagaaaaacaaaaacaaaaacaaaaaaaacaaaaaaaacgaggcaaggtgatggagwtgttaattagcttgatttaaccttcctacaatgtatatgtgttagtccgtttttgcgttgctgtaaagaagtatctgaggctaggtaatttgtaaagaaaagtggcttattttggctcatggttctgtagactataaaggtagcgtggtgctagcatctgcttttggtgagggctcagaaagcttccartcatggcagaa

SEQ ID NO: 1021 - DNA, 401 bp, Homo sapiens
aggtgatggagwtgttaattagcttgatttaaccttcctacaatgtatatgtgttagtccgtttttgcgttgctgtaaagaagtatctgaggctaggtaatttgtaaagaaaagtggcttattttggctcatggttctgtagactataaaggtagcgtggtgctagcatctgcttttggtgagggctcagaaagcttccartcatggcagaaggcaaagggggagcccacatatcagatggtgagagggagcaagagttgagggggaggtgccacrctcttttaaacaaccagatctcatatgaactcagagcaagaactcactcattatcgtgagaacaacaccacgctattcacaagggatccacccccatgaccaaaacacctcccactgggccccac

SEQ ID NO: 1022 - DNA, 401 bp, Homo sapiens
taaagaagtatctgaggctaggtaatttgtaaagaaaagtggcttattttggctcatggttctgtagactataaaggtagcgtggtgctagcatctgcttttggtgagggctcagaaagcttccartcatggcagaaggcaaagggggagcccacatatcagatggtgagagggagcaagagttgagggggaggtgccacrctcttttaaacaaccagatctcatatgaactcagagcaagaactcactcattatcgtgagaacaacaccacgctattcacaagggatccacccccatgaccaaaacacctcccactgggccccacttccaacactgcgggttacatttcaacatgagatttaaaaccatgtcagtatacatacatacattaaaatatgca

SEQ ID NO: 1023 - DNA, 401 bp, Homo sapiens
catacatacattaaaatatgcatcacattgtgccctatacacatataaattattgtttgtcaattaaagaaagaaataattttaaaataaataggccaggcgcagtggctgatgcctataatccaagcactttgggaggccaaggcaggcagattccttgagcccaggagttcaagagcagcctgggcaacatgatgaaayctcatctctaaaaaaatacaaaaattagctgggtatgtggggggtgcacaggtagtcccagctactcaagaggctgaggtggggggattgcttgagcctggcaggcggaggttgcagtgagattgcaccactgcacaccagcctgggtaacccattgagaacctgtcttaataaataaataaataaataaacaaacaaat

SEQ ID NO: 1024 - DNA, 401 bp, Homo sapiens
catagttgaagttgacattaactagcatgtgccaacgagtgacaaaggaaacaagtgcaaagcaagaaaagttagccattatcatggtccatagataatactctcaaccccggctcttgagtgaagcagtattgtgcagtggttacatttatggacctaatggtcaaactgcatgagttcaaatcccagctttacagctawtggttgcattatcttgggcaagtcatttaacatctctgccttaattgattcacctctratatagagctgataggagtctgaaatagctgctataaggactaaatacattaatatatagatagcattcataacagtgttttgtggactttccgaaggtgctgggccttccagttgccttaaagaatggattggattagggt

SEQ ID NO: 1025 - DNA, 401 bp, Homo sapiens
aaagcaagaaaagttagccattatcatggtccatagataatactctcaaccccggctcttgagtgaagcagtattgtgcagtggttacatttatggacctaatggtcaaactgcatgagttcaaatcccagctttacagctawtggttgcattatcttgggcaagtcatttaacatctctgccttaattgattcacctctratatagagctgataggagtctgaaatagctgctataaggactaaatacattaatatatagatagcattcataacagtgttttgtggactttccgaaggtgctgggccttccagttgccttaaagaatggattggattagggtggaggagatgaaaaaaggcatcacagtacatcaagtgmatggtgccagtgtaagtaga

SEQ ID NO: 1026 - DNA, 401 bp, Homo sapiens
gccttaattgattcacctctratatagagctgataggagtctgaaatagctgctataaggactaaatacattaatatatagatagcattcataacagtgttttgtggactttccgaaggtgctgggccttccagttgccttaaagaatggattggattagggtggaggagatgaaaaaaggcatcacagtacatcaagtgmatggtgccagtgtaagtagaatacaggaataaggaaatgcccagcttgttggggggttagtatgaagacctctaactgggactgaaagttctagcaacagtaaaataccctggcctccaactactaagtaccctgaatactaagatgagtttatttttcattctatagacaatttccatctctttctttcaaaacaaaca

SEQ ID NO: 1027 - DNA, 401 bp, Homo sapiens
gtgtaagtagaatacaggaataaggaaatgcccagcttgttggggggttagtatgaagacctctaactgggactgaaagttctagcaacagtaaaataccctggcctccaactactaagtaccctgaatactaagatgagtttatttttcattctatagacaatttccatctctttctttcaaaacaaacaaatgatgacrctgtatgagtaacagaagatgactgggaacagaaccgtgaacagaattaagcacctgcaatcaaataaaattcacagaaaacttaatttaccacattagtgatatgcataatcgttgttgtrctggtaaccagctcttcaggaaaaaaaaaagaaaattcctgatttgttaaaatactgtcactatggcccactgaaact

SEQ ID NO: 1028 - DNA, 401 bp, Homo sapiens
cctgaatactaagatgagtttatttttcattctatagacaatttccatctctttctttcaaaacaaacaaatgatgacrctgtatgagtaacagaagatgactgggaacagaaccgtgaacagaattaagcacctgcaatcaaataaaattcacagaaaacttaatttaccacattagtgatatgcataatcgttgttgtrctggtaaccagctcttcaggaaaaaaaaaagaaaattcctgatttgttaaaatactgtcactatggcccactgaaactatcaaaatgaggcatataacaggaaattgggaggagagttatacaatcagctcttgctagaaaatgatgatcattgacattacccttatggaaccaatccaaatttgggsgttgttttcttt

SEQ ID NO: 1029 - DNA, 401 bp, Homo sapiens
aatcgttgttgtrctggtaaccagctcttcaggaaaaaaaaaagaaaattcctgatttgttaaaatactgtcactatggcccactgaaactatcaaaatgaggcatataacaggaaattgggaggagagttatacaatcagctcttgctagaaaatgatgatcattgacattacccttatggaaccaatccaaatttgggsgttgttttctttctttctacttttgtgtgtgtgtgtgtgtgtgtgtgtgttctctggtatctgtaaataacatccatatcagtttctccatccattctttgcacatcactggtaatgcctgagatcaaatctgccatgcttttccgggcagatccaggctgggatctcagtatccctgcttccctgaagctgtccaacct

SEQ ID NO: 1030 - DNA, 401 bp, Homo sapiens
gtccaacctcactcccttcattgctctgctgtgattaggaaggagccattccaaggactatggggtgctctgtgggataagcccagtccttcttccatacaggaggaacaggggacgggtgctgacaagaggaaatgcatggagcagagagagggaacaggcagatggactcaaggtccccagactctttcgagtgttgartcagaaggactggagctgtgggggaagagggtgggaacagggtagtggaataacatgcagacagatgggctgaactgaaggtccagaggcactcccagccgtcaaccagcagttcttacaccaggttgatgttagggaacaaccccagctttaaaacttatttataccaaagtgccaaatgactcatttgagacaaggct

SEQ ID NO: 1031 - DNA, 401 bp, Homo sapiens
aagttatgcatttagttgcctcttgttcattagtctggacttagagcaaagtgactacttcaacttcttgtgctcaacatatgccacagttgcttacatgtgataagtccatttgtcacttgataagcctttgctagaatttccttctctccatctccaaccttataatgatcttgaaggcaatgtcggaggctaggtaartcttctttgtgttccccacttgagcataggtgagctgtcatgtcaatttccttacactactgagaagaggggatgtgggtgggcagggacccccagaaacaactttacccctttcacagtttccatcactgcctccaatgtccaccgacgttagaaagtttgggcagaagtggccaggtgcggtggctcacgcctgtaat

SEQ ID NO: 1032 - DNA, 401 bp, Homo sapiens
ccctttcacagtttccatcactgcctccaatgtccaccgacgttagaaagtttgggcagaagtggccaggtgcggtggctcacgcctgtaatcccagcactttggggggccgaggcgggcagatcacaagctcaggagatcgagaccatcctggctaacatggtgaaaacccgtctctactaaaaatacaaaaattagccrggcgtggtgtcaggcgcctgcagtcccagctactagggaggctgaggcagaagaatggcatgaacccaggaggcggagcttgcagtgagccaagatcgcaccactgcactccagcctgggcgacagagcaagactccgtatcaaaaaaaaaaaaaagaaagtttgggcaaaacctagagtttcagggaaagtcatttgag

SEQ ID NO: 1033 - DNA, 401 bp, Homo sapiens
aaaacatgagagaagggagtcaactttgacagagatttcaagagcagatcactgatgaaatgtgataacattcagaaaatagagaagttgacatgggctttgatgaaaacacaatgagttcagtttgaagcattttgaagtcaaggtgattttgtgaaatacaaacgatgctgtccagcaggcatagaatctatctggagycatttgtacaatatacctatgccttttttttttctttctcctactgtagacttagataggaactcacttttgtcttttttctgctaggccaataaatacgttctcagcttagaaaaggggctttttggtttgcctatttctgtttctttttacagaagttaacacatttatttgtgacctattaaaatcatgaagtatta

SEQ ID NO: 1034 - DNA, 401 bp, Homo sapiens
attcttgtgcaaagaaggattccaaagggtttcagaaatactaaacttcttgaaattgaaattgaaattgaaatccttcttggcttctctacctgttacttcctctgcagtgctcagtatagtgtctgctctccctcctttctttttctttttttttgagacagattttcactcttgttgcctaggctggagtgtaatggygcaatcttggctcaccgcaacctctgcctcttgggttcaagcgatactcctgcctcagcctcccaaggagctgggattatagtaccacgcccagctaattttgtcttttcagtagagatggggtttctccatgttggtcaggctggtctccaactcctgacctctggtgatcctccctcctcggcctcccaaagtgctgg

SEQ ID NO: 1035 - DNA, 401 bp, Homo sapiens
tcaaacccctaaagttatccttgaataaatgagccttgcaaattatatttccccaatttgcacttatttctttcttttttttcttttttctttgagacagagtttcactcttattgcccaggttggagtgcaatggagtgatctcagctcactgcaacctccgcctcctgggtttaagcaattctcctgcctcagcctccyragtagctgggattacaggcgctccccccctccccatgcctggctaattttttatatttttagtagacagggttttgccgtgttggccaggctggtctcaaactcctgacctcaagggatctgcccacttcggcctcccaaagtgctgggattacagatgtgagccaccgcacccagcctcagaatttcttactgaataa

SEQ ID NO: 1036 - DNA, 401 bp, Homo sapiens
caaacccctaaagttatccttgaataaatgagccttgcaaattatatttccccaatttgcacttatttctttcttttttttcttttttctttgagacagagtttcactcttattgcccaggttggagtgcaatggagtgatctcagctcactgcaacctccgcctcctgggtttaagcaattctcctgcctcagcctccyragtagctgggattacaggcgctccccccctccccatgcctggctaattttttatatttttagtagacagggttttgccgtgttggccaggctggtctcaaactcctgacctcaagggatctgcccacttcggcctcccaaagtgctgggattacagatgtgagccaccgcacccagcctcagaatttcttactgaataat

SEQ ID NO: 1037 - DNA, 401 bp, Homo sapiens
cccctccccatgcctggctaattttttatatttttagtagacagggttttgccgtgttggccaggctggtctcaaactcctgacctcaagggatctgcccacttcggcctcccaaagtgctgggattacagatgtgagccaccgcacccagcctcagaatttcttactgaataatccttttatagtttgttataactaacwcaaaacagtagtgggagttcttattcagatagctaamaaattccaggcacctcctgtactataagtgtccctcatagcacaaaggggaaagctgccctttaagaatccataaatgcaatgaaactctacttacgccacccaggttgttaggacacaggaatattaatctggagaagcctttgataatagaatatagtcaa

SEQ ID NO: 1038 - DNA, 401 bp, Homo sapiens
tagacagggttttgccgtgttggccaggctggtctcaaactcctgacctcaagggatctgcccacttcggcctcccaaagtgctgggattacagatgtgagccaccgcacccagcctcagaatttcttactgaataatccttttatagtttgttataactaacwcaaaacagtagtgggagttcttattcagatagctaamaaattccaggcacctcctgtactataagtgtccctcatagcacaaaggggaaagctgccctttaagaatccataaatgcaatgaaactctacttacgccacccaggttgttaggacacaggaatattaatctggagaagcctttgataatagaatatagtcaaagttgacattgtgctagaatatttgaattttttattt

SEQ ID NO: 1039 - DNA, 401 bp, Homo sapiens
attgtgctagaatatttgaattttttattttccagaaattattttcactctttgctacatttactgtttgacctcaaaagaatgtaaaagcaagtttttaaatacaccattatttcctcaagaggctacagaattgctggatttttttttttttttggaatggagtcttgctctgccacccaggctggagtgcagtggcaygaccttggcacactgcaacctccacctcctgggttcaagcagttctcttacctcagcctcctgagtagctgagattacaggtgtgtgctcccatgcctggctaatttttgtatttttagtagaggtggggtttcgccatgttggccaggctggtctcaaattcctgacctcaagcaattcacttgccacagcctcccaaa

SEQ ID NO: 1040 - DNA, 401 bp, Homo sapiens
gtacatttttgtcaaatgaacctaattggcaaagcaaaatctcatcttttaaatttctgagtttccactattgataaaaaaaaaaaaaataacgtaaaacagtgttggattttcaaactcaaaagaaagaaaaaaaccacaaaaaacaaaaaaagcagaagttgggtaaaaacgagttctgactaaaagctgcaatactgyctcaaatgtgcccrtgaccccacctattgctcaatttctacaccatgagggtaaagggaaacgaaatgcaacttggattcacttgacttcttaagtcttacagagagagaaactgatcagaaaagatacatttttggaggttggtttttttttttaattcttgcttgtaaggcagggcttggtgactcctggtctcctcc

SEQ ID NO: 1041 - DNA, 401 bp, Homo sapiens
aatgaacctaattggcaaagcaaaatctcatcttttaaatttctgagtttccactattgataaaaaaaaaaaaaataacgtaaaacagtgttggattttcaaactcaaaagaaagaaaaaaaccacaaaaaacaaaaaaagcagaagttgggtaaaaacgagttctgactaaaagctgcaatactgyctcaaatgtgcccrtgaccccacctattgctcaatttctacaccatgagggtaaagggaaacgaaatgcaacttggattcacttgacttcttaagtcttacagagagagaaactgatcagaaaagatacatttttggaggttggtttttttttttaattcttgcttgtaaggcagggcttggtgactcctggtctcctccaatagcctaatttt

SEQ ID NO: 1042 - DNA, 401 bp, Homo sapiens
aattcttgcttgtaaggcagggcttggtgactcctggtctcctccaatagcctaattttcctcccaaaagtaagcttttgattccactagggtgggcaagtatctttgtactctgccatttcagagataagagccaactgattttagaaatccaagagcaaatgaaatgtgcaacattttactcttggattgcttgagacygcatctgtatgcctattccctggagtgcagactgtcttgtgagcatttggtgccactgaactctgaaaatcagggcatgcagcatctgctggggaacacaatctggtttctgtggatcagaagcatttctctacacgttagagtcttaaggatttttaaagagagcaggtctactcaggcaactcgttaccgtccctttc

SEQ ID NO: 1043 - DNA, 401 bp, Homo sapiens
ccttcagtcattagtgacagatctattttaaagggacgaggttgtgcaacaagggtacaaaggcagctcatggttctaattgttgggctccattagaaggggtctttctggagactgtggtttcttagagcaccgcagtctacccctgaatgaaaggcatcctgctggctaattaacttgcagcactttcttctctattgkgccttgattttttgttttgtttggttttaatctcagaccttgtttctagtaggactgatggagtcttccattatttcgccyaaatattttatgaagaacaragtttccaatcactcactcactctgatttcattacttttagcatacttttcgttcttataatctgcaataaagaggaagactattaagattcaagcttg

SEQ ID NO: 1044 - DNA, 401 bp, Homo sapiens
gttgggctccattagaaggggtctttctggagactgtggtttcttagagcaccgcagtctacccctgaatgaaaggcatcctgctggctaattaacttgcagcactttcttctctattgkgccttgattttttgttttgtttggttttaatctcagaccttgtttctagtaggactgatggagtcttccattatttcgccyaaatattttatgaagaacaragtttccaatcactcactcactctgatttcattacttttagcatacttttcgttcttataatctgcaataaagaggaagactattaagattcaagcttgtttgagcaagtacactgccagagcaaaatcagaggaattcatggaagactgggaaggtgcaagtaatctttctcttagaat

SEQ ID NO: 1045 - DNA, 401 bp, Homo sapiens
gtctttctggagactgtggtttcttagagcaccgcagtctacccctgaatgaaaggcatcctgctggctaattaacttgcagcactttcttctctattgkgccttgattttttgttttgtttggttttaatctcagaccttgtttctagtaggactgatggagtcttccattatttcgccyaaatattttatgaagaacaragtttccaatcactcactcactctgatttcattacttttagcatacttttcgttcttataatctgcaataaagaggaagactattaagattcaagcttgtttgagcaagtacactgccagagcaaaatcagaggaattcatggaagactgggaaggtgcaagtaatctttctcttagaattgtgatggtaacatatgaaa

SEQ ID NO: 1046 - DNA, 401 bp, Homo sapiens
cagcttgggcaacatggcaaaaccccatctctacccaaacaaacaaacaaacaaacaaacaaactagccaggcatggtggcaactgcttgtagtctagctacagcttccatgaattgttcagtgatgctctcttaactccatgatctatggaacaggcaggcagaaatggagagacagtgggtggaggggaggagcctcaratggcacagaaatctgtagcatctagatcagagtgacacctcagagtttcgagtaacgacaggcacctggcccatggctgggattgttaccagtggtgaatctgtgcaggtctgcagcaacctcaattcttccctcyttaggataaaaacttcattgaggggcataaagcagaagagactgaagcaagttttagagaggg

SEQ ID NO: 1047 - DNA, 401 bp, Homo sapiens
tccatgatctatggaacaggcaggcagaaatggagagacagtgggtggaggggaggagcctcaratggcacagaaatctgtagcatctagatcagagtgacacctcagagtttcgagtaacgacaggcacctggcccatggctgggattgttaccagtggtgaatctgtgcaggtctgcagcaacctcaattcttccctcyttaggataaaaacttcattgaggggcataaagcagaagagactgaagcaagttttagagagggagtgaaagtttattaaaaagctttagagcaggaatgaaaagaaagtaaaatacacttggaagagggccaagcagacatcttggaggtcaagcacagggatttgaccttctgacttgggggtgtatatgctggcctat

SEQ ID NO: 1048 - DNA, 401 bp, Homo sapiens
gaatgaaaagaaagtaaaatacacttggaagagggccaagcagacatcttggaggtcaagcacagggatttgaccttctgacttgggggtgtatatgctggcctatttccagcacttcacatcccttttcccttgattcttcctttaggatgggctgccgcatgtgtggtggcctgctagtgcttgggaagtgagcatgcrcagtgtgtttactggcgttgtacacatgctcacctgaggcgttcttcgggtgaatgcccccagaaagtcatgtaccagttaaactctgccatttggcctcttagtgcatatgtgtgagccccctgcscaactcctgggaccttatcgggaagctgataatcaccagtttcagatttttcctatttataaaaagactgcct

SEQ ID NO: 1049 - DNA, 401 bp, Homo sapiens
ttcccttgattcttcctttaggatgggctgccgcatgtgtggtggcctgctagtgcttgggaagtgagcatgcrcagtgtgtttactggcgttgtacacatgctcacctgaggcgttcttcgggtgaatgcccccagaaagtcatgtaccagttaaactctgccatttggcctcttagtgcatatgtgtgagccccctgcscaactcctgggaccttatcgggaagctgataatcaccagtttcagatttttcctatttataaaaagactgcctttccctggagctggctgcaaccaattattttagagagacagttaccaaccacctgttcatcacttgatggtggcctgacattcctggttagggcggggggcactgtcctgctctgctcatgtctgcc

SEQ ID NO: 1050 - DNA, 401 bp, Homo sapiens
ctgtcctgctctgctcatgtctgcctacctactgtagcaggaccacaggcagacttttcttaaggagactcccagctttcttcctggtgaaggacccagagtttgtgagcccaggactgcagataatcaaaaatattaaattatggaagctaaatatttaaaataataactcataatggctctccaaatgtctgtaaaagsatttcacttaacaatasctggcaaatattatgtcagtggaaaatacagccaagttttggctcatccaaaatgttgtcatcaccgccactttaatatttaagagattaatgtttcaaggctcttccagaacattgtatttggagtctgattgaaagactcctcggtcctccctcattattctttatgtgtgactttggatg

SEQ ID NO: 1051 - DNA, 401 bp, Homo sapiens
tgtctgcctacctactgtagcaggaccacaggcagacttttcttaaggagactcccagctttcttcctggtgaaggacccagagtttgtgagcccaggactgcagataatcaaaaatattaaattatggaagctaaatatttaaaataataactcataatggctctccaaatgtctgtaaaagsatttcacttaacaatasctggcaaatattatgtcagtggaaaatacagccaagttttggctcatccaaaatgttgtcatcaccgccactttaatatttaagagattaatgtttcaaggctcttccagaacattgtatttggagtctgattgaaagactcctcggtcctccctcattattctttatgtgtgactttggatgctctcaatacacttaaa

SEQ ID NO: 1052 - DNA, 401 bp, Homo sapiens
ttgtattttaacaaggcctccatgcaattctgatgtgccctccagttttagaattgatgctctgtgcaaatgaacaggtactggggcataatgatatgcaggactgttcttgagccaggctttgtattcatgaagtgggtgatagttgattggcattgtttcagtactcagtagctatgaagcattctattggtatcattrgtattaaatatggagcagaagcataactcatctccctcatggccacatgaagaaagatcagtatgttagagctgaaggacacctaaagccccaaacaactgccagagaccaaaatcatttgtctcaagaaatgttaacaccctttttgtgttcaagttttattatttctttactaaaattgcccattcacccctttgttt

SEQ ID NO: 1053 - DNA, 401 bp, Homo sapiens
attatttctttactaaaattgcccattcacccctttgttttatttttcacacctaaaaaagtagccaagtttgaaaaagaaagagtgcttgccaccctttctgtccttaaagtgaaggccttgtctatctcattctgatctctgcccatccatcaccattcagcactcctgttgtgacttcgccccatctccaatcttacrttttattttcttggtacttttggtcatggctgtgttgatggtttcagaagaatacatagtatattaaggggtaacgtttacaaatgttcttgagagaactaatttttcccccttcatctcaaggtgtcactgcttaattattacggttcctaaataatctctatgatgtggttaactatccctaccttgcagaaatcctg

SEQ ID NO: 1054 - DNA, 401 bp, Homo sapiens
cttaattattacggttcctaaataatctctatgatgtggttaactatccctaccttgcagaaatcctggaagatgagacggacctagcatgttgtgtgagcaacatctcttagagataatcaatttgatatcagcacaattattgtggctactattgaaatttctcttagtttcttagattagtactattggaactaatcrtaaataaccaatttacaagaaaatgagtctcattatattatagcacgaagaggatatattcaaggagatacacctttgaatctattatttcratatgcttataaaaattactattttaataaatttcccagtcaatcctattgtgtagaaaaagatgcttcactgcttacatattttaagatgagactgggaacaagcag

SEQ ID NO: 1055 - DNA, 401 bp, Homo sapiens
tgtgtgagcaacatctcttagagataatcaatttgatatcagcacaattattgtggctactattgaaatttctcttagtttcttagattagtactattggaactaatcrtaaataaccaatttacaagaaaatgagtctcattatattatagcacgaagaggatatattcaaggagatacacctttgaatctattatttcratatgcttataaaaattactattttaataaatttcccagtcaatcctattgtgtagaaaaagatgcttcactgcttacatattttaagatgagactgggaacaagcagattaatttggttgtgagactgggagtttatgagcaaaatgttcttctgtgcaaacgaagtagaagcttcatttcccttcccttcagttaacc

SEQ ID NO: 1056 - DNA, 401 bp, Homo sapiens
aaaactagactaaattctgtattgaaaatgtcaagtcaaatatgctatataaccaagaaatatcagtatagaatatcatgtattctacacaaagctacattttcaatataatccccgtaattatttcactcatcaaagaaatgtatccagctgagacataaaaccttagtcaatacattaagaaaaaaagaaaaaaaaaamcatttttttcccagtcatggggaccagattgtgtctattattcatcagggcctagcacaatgttgagcacatgctcaaggtggccaataaatccttgtggaattgagttatatgggagtcaattattcggtcacagcactggattaggaggttgagttcttgatagatttactttcagctgacctgtgtgacatttggta

SEQ ID NO: 1057 - DNA, 401 bp, Homo sapiens
catttggtatttggttttgcaactttgttttcagttttttccatgcaccaatactcctagaattttgcttttgcctcttttcttccctttcatcttttttttttttctgtagaaagcatacatccatatagaagacctctctcaatacattccagatctgagttgcagtgcagcacttagcttagcttgtgaaacactccraagacttgattaatatcatcctatggagagatgtccttaagtaacttagaatggatcctttatttttccagtaaataaactctaaaatatgaggatttccaaggtgaaaagaaagagtacgaacccaagaaatattttaaatgaatcttgttttccgtccctgtgttctgagtaacatctgtattcacccctgcctttcc

SEQ ID NO: 1058 - DNA, 401 bp, Homo sapiens
atatttgtcgttgaattatttcttctttgtttaaaattaaataatgcaagtgatttttttgctttagaaaggaggattacctcttcctagacatccagttgaaaaaccaactggtatagaagggaaatgcatctcaaacagatacaatgacattcttataattgcctcatttgaaatggcagcatttccccgtgctaattrtcatccttcagctaatttggtacattaaaggagattgttattaaaaacaaaattaaatccattgccagcatctttattctctaccagaagaaaaattttaaataaatgcaaatacgccagttttgctcttaatgttgcctgaagttgaaaggatgaactttgacttgaaagataatgagttccccctgttggaggatytg

SEQ ID NO: 1059 - DNA, 401 bp, Homo sapiens
ttrtcatccttcagctaatttggtacattaaaggagattgttattaaaaacaaaattaaatccattgccagcatctttattctctaccagaagaaaaattttaaataaatgcaaatacgccagttttgctcttaatgttgcctgaagttgaaaggatgaactttgacttgaaagataatgagttccccctgttggaggatytgaggtttgggttggataatcccagatgatgttggaatagacagaatttaaggttccttctaaccctgaaattctatggttataaaatctatccttttcttgaaagaagaaatattaaaggtgttttcaaggaaatggtagcataatgaaaaaggaaacacaaaaatgatttttttttccttaataagcagtcacctcac

SEQ ID NO: 1060 - DNA, 401 bp, Homo sapiens
tttttcttcttaattgcttgtttgtttgtaacaaatgcggtggtgtaatcaagtggcttttacaataataaaacacttctctcaattaaactgtactgcaaggaattcaaagatgaacagaagtgttccttcttttaagatgctgatttataagcatccctttaaaatttacttctctttctgatgataaaagtaatacaygtttattgtagaacatttggaaactaccagggactataaataacccatagttgccccaccagagaatattcttaatatttttggcatatttcttccatatatctattcatattcacattcatactaatttgtcatattctaatttaaccctctctttaatgtttataatgtgattatactactttttaacacatgaattg

SEQ ID NO: 1061 - DNA, 401 bp, Homo sapiens
ttgttgttgttgttttgagacagagtttcactcttgttgcccaggctgaagtgcagtggtgtgatctcggctcactgaaacctctgcctcccaggttgaagggattctcctgcctcaccctcccgagcagctgggattacaggcgctcgccaccacgcccagctaatttttatatttttagtagagatggggtttcgccaygttggccaggctggtctcgaaccctgacttcaggtgatccacccgcttcagcctcccaaagtgttgggattacaggagtgagccactgtgcccagcctgtttggttttgtttttgttattgtttgtttgtttggagtatgtctttattagcagtgtgagaacaaactaatacatcagaagttctgattttcatatcagca

SEQ ID NO: 1062 - DNA, 401 bp, Homo sapiens
aaagattcctccaggacttttacaaagacagatgatattaaactgaacaaatagtgctaggtaagaagtaaattgttcaattttttcacagaagccctgtagattttagcaaaaccccccagacacaatgtcaaatttctcagcaggtttcttggttttagctcttccccttaagcagtagttaacagaatattagatgtkagtaaagttatttctttgttattctacctgggttgactaccagagaaaatccctgaacattttacaaattgctcaacagattttcatctaaaactagaaaagattggccagttatggtggctcacgcaggaacattgctttagcccaggagctgaaaaccagcctgggcaatagagtgggacccccatttctaaaaaata

SEQ ID NO: 1063 - DNA, 401 bp, Homo sapiens
tgggttgactaccagagaaaatccctgaacattttacaaattgctcaacagattttcatctaaaactagaaaagattggccagttatggtggctcacgcaggaacattgctttagcccaggagctgaaaaccagcctgggcaatagagtgggacccccatttctaaaaaataatatcttttaaaaaattaactgggcatgkcggtgcgtgcctgtagtctcacctacttgggaaactaaggagggaggattgcttaagcccaggatgtcaagattgcggtgagctatgattgagccactgcactccagcctggaggacagagtaagaccctgtctcaaaataaaataaaataaaattagaaaggataggtgtgtktgggagggagactggttaaycagggt

SEQ ID NO: 1064 - DNA, 401 bp, Homo sapiens
atcttttaaaaaattaactgggcatgkcggtgcgtgcctgtagtctcacctacttgggaaactaaggagggaggattgcttaagcccaggatgtcaagattgcggtgagctatgattgagccactgcactccagcctggaggacagagtaagaccctgtctcaaaataaaataaaataaaattagaaaggataggtgtgtktgggagggagactggttaaycagggtgcatgggattatgtagggcttgtctttcatttgagttcttctctgtctttttaaaatgactgattatatatattaggtcccaatggcttcattatcactattattttaattcataggttaaattttataaacatgaaaaataattgacaagcctagaatctcttttctgtctat

SEQ ID NO: 1065 - DNA, 401 bp, Homo sapiens
ggcatgkcggtgcgtgcctgtagtctcacctacttgggaaactaaggagggaggattgcttaagcccaggatgtcaagattgcggtgagctatgattgagccactgcactccagcctggaggacagagtaagaccctgtctcaaaataaaataaaataaaattagaaaggataggtgtgtktgggagggagactggttaaycagggtgcatgggattatgtagggcttgtctttcatttgagttcttctctgtctttttaaaatgactgattatatatattaggtcccaatggcttcattatcactattattttaattcataggttaaattttataaacatgaaaaataattgacaagcctagaatctcttttctgtctatattagaaattaaattatatt

SEQ ID NO: 1066 - DNA, 401 bp, Homo sapiens
tgcatgggattatgtagggcttgtctttcatttgagttcttctctgtctttttaaaatgactgattatatatattaggtcccaatggcttcattatcactattattttaattcataggttaaattttataaacatgaaaaataattgacaagcctagaatctcttttctgtctatattagaaattaaattatatttagtakttaagcaatacatgcatacatctcatgtaatccttactgtaattaaggatgaaattatgtaacataggaaaagcagatgtaagttctcattctccttttacacataaggaaattaattcagacttttagtaagttgcccagaatcacgcagctagtaagattcagaactaaaaatataatacctgtcttctaattcaaat

SEQ ID NO: 1067 - DNA, 401 bp, Homo sapiens
atctctaaaatgatacctaaaatgataaacaatttaaatttagcataattatcattttttaacttacagattgacatatttctgcaagtgttttcagaggcattggggccacagaagtccaagtcaaggcaatttttggtactaaacagttgacttttctctggtccacatcaaagctgccactgtgcagagaactaacaygtgtaygtgactagtctagggctggaggaacatgcgaggggactgttggaaaggaaaaacttttgctcttcctctaggttcagtaaattagggactgtaaacaataataatgaaagattaataagaggcacacaattttattttattttattttatttacttatttttttgagacagagtttcrctcttgttgcccaagc

SEQ ID NO: 1068 - DNA, 401 bp, Homo sapiens
aaaatgatacctaaaatgataaacaatttaaatttagcataattatcattttttaacttacagattgacatatttctgcaagtgttttcagaggcattggggccacagaagtccaagtcaaggcaatttttggtactaaacagttgacttttctctggtccacatcaaagctgccactgtgcagagaactaacaygtgtaygtgactagtctagggctggaggaacatgcgaggggactgttggaaaggaaaaacttttgctcttcctctaggttcagtaaattagggactgtaaacaataataatgaaagattaataagaggcacacaattttattttattttattttatttacttatttttttgagacagagtttcrctcttgttgcccaagctggggt

SEQ ID NO: 1069 - DNA, 401 bp, Homo sapiens
gtgcagagaactaacaygtgtaygtgactagtctagggctggaggaacatgcgaggggactgttggaaaggaaaaacttttgctcttcctctaggttcagtaaattagggactgtaaacaataataatgaaagattaataagaggcacacaattttattttattttattttatttacttatttttttgagacagagtttcrctcttgttgcccaagctggggtgcaatggcacgatctcggctcaccacaacctccccttcccgggttcaagtgattctcctgtctcagcctaccaagtagctgggattacagacatgcatgaccatgcccggctaattttgtagttttagtagagactgggtttctccatgttggtcagcctagtctcgaactcctgacc

SEQ ID NO: 1070 - DNA, 401 bp, Homo sapiens
cctccccttcccgggttcaagtgattctcctgtctcagcctaccaagtagctgggattacagacatgcatgaccatgcccggctaattttgtagttttagtagagactgggtttctccatgttggtcagcctagtctcgaactcctgacctcaggtcatccactcacctcggcctcccaaagtactgggattacaggtgtragccactgtgcccggccccacaattttattaatatttatatgcaaaagagcttgtagaaaatcagtgaaaatcaaagaagtggttagactagggggtttataaacccttcttaaccaaggaaagagggtttgggcatcaatgagtggcgaattgtggagaagtgactagaaaatgtatgagagaaactaatggaaggtat

SEQ ID NO: 1071 - DNA, 401 bp, Homo sapiens
agaaaaacaaagattaacagttggagcagactctaaagccagtttttgagtccagaaggcagttagttggcaagatttctaaatgttggattcaaggctgggtgcggtagctgacatctataatcccaacattttgggaggctcaagtgggagaattgctcgaggccaggagttcaagataaacccgggcaacacagtgtractccatctctaataaagtcatccaaatgtagttgtatgcacctgtggtaccaactactcaggaggctgaggtggacggattgcttgagcccaggaggtctaggctgcagtgagccatgatcacaccactgccctccagcctgggcgacagagtgagatcctgtcttaaaaataaataaataaataaataaatgttggat

SEQ ID NO: 1072 - DNA, 401 bp, Homo sapiens
gtggacggattgcttgagcccaggaggtctaggctgcagtgagccatgatcacaccactgccctccagcctgggcgacagagtgagatcctgtcttaaaaataaataaataaataaataaatgttggatgaagtgtctttagatggtggattgaggataacaggggcagtctcagtcacgtgcatttcccggagtttgaargaacatgttctggtgagcttcctgagtggtccaaactacggtagtgataattcctttgaagttaggttcagttgtccaacttcagcttccagggctccaagaaaagggcaattgtggttctcagtgatgccaagtcacaagggtgagagaagactggaaacattaattacaagatggcaggattcagtttataaaggggg

SEQ ID NO: 1073 - DNA, 401 bp, Homo sapiens
agcaatgtcagcagaagcctgtactccagagtacctgccaaggttttgttcatgaatctctaatatgctctttctttgctgaagatgaggcatgctggcctacagctgactgcgtgagccttcagaaaagcatcggcataaaacaataattatctgtgaatgacaatgacttaaaatggccatacctaaagatctgatgarwgttcattataagtcaattgataaagaaatttggtygtttctctgacatacaggattttaagataataatgtgataccaagacatctcatgaacagcaagggcaytgacagatttctaggaattttatatgatttctgaaaaatcaaaatcattatatccatacaaatataacccaggaatggttaaatatcttctcttt

SEQ ID NO: 1074 - DNA, 401 bp, Homo sapiens
gcaatgtcagcagaagcctgtactccagagtacctgccaaggttttgttcatgaatctctaatatgctctttctttgctgaagatgaggcatgctggcctacagctgactgcgtgagccttcagaaaagcatcggcataaaacaataattatctgtgaatgacaatgacttaaaatggccatacctaaagatctgatgarwgttcattataagtcaattgataaagaaatttggtygtttctctgacatacaggattttaagataataatgtgataccaagacatctcatgaacagcaagggcaytgacagatttctaggaattttatatgatttctgaaaaatcaaaatcattatatccatacaaatataacccaggaatggttaaatatcttctcttta

SEQ ID NO: 1075 - DNA, 401 bp, Homo sapiens
gccaaggttttgttcatgaatctctaatatgctctttctttgctgaagatgaggcatgctggcctacagctgactgcgtgagccttcagaaaagcatcggcataaaacaataattatctgtgaatgacaatgacttaaaatggccatacctaaagatctgatgarwgttcattataagtcaattgataaagaaatttggtygtttctctgacatacaggattttaagataataatgtgataccaagacatctcatgaacagcaagggcaytgacagatttctaggaattttatatgatttctgaaaaatcaaaatcattatatccatacaaatataacccaggaatggttaaatatcttctctttatttgacagtgcttcccatgcaatttagcatattaa

SEQ ID NO: 1076 - DNA, 401 bp, Homo sapiens
ctgactgcgtgagccttcagaaaagcatcggcataaaacaataattatctgtgaatgacaatgacttaaaatggccatacctaaagatctgatgarwgttcattataagtcaattgataaagaaatttggtygtttctctgacatacaggattttaagataataatgtgataccaagacatctcatgaacagcaagggcaytgacagatttctaggaattttatatgatttctgaaaaatcaaaatcattatatccatacaaatataacccaggaatggttaaatatcttctctttatttgacagtgcttcccatgcaatttagcatattaaataagctcatctctctttttacaaactgagagaacaaatcctttgagagttttccaggggccctctggg

SEQ ID NO: 1077 - DNA, 401 bp, Homo sapiens
gaggccaggagttcaagaccagcctaggcaatatagtgagaccctgtctctctaagaacaaaaaatagattaataaaccaagaaaacttgctcattttaaaagtagttttgcatcaatacactactgtattagtccattcttgcattgctgtaaagaaatacctgagattgggtaatttacaaagaaaagaggttgactcrcagctctgyaggctatacaagaagcatagcagcttctgcttcttgggaggcatcgggaagcctccaatcatggcagaaggtgaaggtggagtaggcgtcttacatggcaggagcaggagcaacagagggtaaggggtcaggtgccacacaattttaaatgaccagatcttacgagaactcggtcactatcatgagtacag

SEQ ID NO: 1078 - DNA, 401 bp, Homo sapiens
agttcaagaccagcctaggcaatatagtgagaccctgtctctctaagaacaaaaaatagattaataaaccaagaaaacttgctcattttaaaagtagttttgcatcaatacactactgtattagtccattcttgcattgctgtaaagaaatacctgagattgggtaatttacaaagaaaagaggttgactcrcagctctgyaggctatacaagaagcatagcagcttctgcttcttgggaggcatcgggaagcctccaatcatggcagaaggtgaaggtggagtaggcgtcttacatggcaggagcaggagcaacagagggtaaggggtcaggtgccacacaattttaaatgaccagatcttacgagaactcggtcactatcatgagtacagtaccaagag

SEQ ID NO: 1079 - DNA, 401 bp, Homo sapiens
cagcgtggccacacaatgtaagattctctctctcttctgttctctctctctctctttcactgacctttacaactttctatatcaactcacatttttgtcctttattttcgtctttcttatttaaatgacctctaaactactctaggataaaagtcactgtcatttttctttaacaaaaacacatctcactctccttgtackctttgcctgcagagttttgtttcttcatcctattattactagtagttcatttacayatatttattagatttcttaacccttagtaacattaactttcagtgaaaatgaagaaataaacaatcataaactgtcagttacatacatgcattctgtgctacattagcacaggtataaatacattctctcataatttctagagg

SEQ ID NO: 1080 - DNA, 401 bp, Homo sapiens
tcactgacctttacaactttctatatcaactcacatttttgtcctttattttcgtctttcttatttaaatgacctctaaactactctaggataaaagtcactgtcatttttctttaacaaaaacacatctcactctccttgtackctttgcctgcagagttttgtttcttcatcctattattactagtagttcatttacayatatttattagatttcttaacccttagtaacattaactttcagtgaaaatgaagaaataaacaatcataaactgtcagttacatacatgcattctgtgctacattagcacaggtataaatacattctctcataatttctagaggcatgtttcctaacagtacaacttctcagtgtggcaaaagagcaggtttattaacag

SEQ ID NO: 1081 - DNA, 401 bp, Homo sapiens
gtgctacattagcacaggtataaatacattctctcataatttctagaggcatgtttcctaacagtacaacttctcagtgtggcaaaagagcaggtttattaacagatccaaatacctttagtctctgccaaattaagaagtcaaaagtagccgggcgcagtggctcacgcctgtaatcccagcacttcgggaggctgagaygggcggatcatgaggtcaggagatggagaccatcctggctaacacaatgaaaccccatctctactaaaaatacaaaaaaaattagctgggcatggtggcgggcgcctgtagtcccagctactcaggaggctgaggcagaagaatggcgtgaaccagggaggcggagcttgcagtaagccgagatggtgccactgcactcc

SEQ ID NO: 1082 - DNA, 401 bp, Homo sapiens
aaaaatacaaaaaaaattagctgggcatggtggcgggcgcctgtagtcccagctactcaggaggctgaggcagaagaatggcgtgaaccagggaggcggagcttgcagtaagccgagatggtgccactgcactccagcctgggctacagagcgagactctgtctcagaaaaaaaaaaaaaaaaaaaaaaaaaaaaggaaayaaacttaaatagataaactttagtaattagtattttggtattttattttctttgaaattatctacctatttcatgaatatccgtcatttaacttagtataactttaagatttcaagtaaccaaaaagatgtcggaaactatttttaagtcactgtactataaaacagttattgttgaaataaagtttgtcagagtaatga

SEQ ID NO: 1083 - DNA, 401 bp, Homo sapiens
catgcttgagcccacttacccaactcctgcgatcttagccggaagctgctgatcagcagtttcaggctcttcctatctgttgggagcctgcctttccctggtgccagctgcaaccaattattattttagagagacagttaaggactgcctgtccatcacctgatggtcgtctgacattcctggttgtggggaaagggaacmctctcctgccctgctcatgtctgactagctacctgctgtaacaaaactagttttatttaccaaagattatcttatatcagataaacttgaaaacatgttggttatatttaaccattaaataatatatttggttatatttctgagtgttttagcaatacttataagygtttttttaagccaacttagaatagaactcattt

SEQ ID NO: 1084 - DNA, 401 bp, Homo sapiens
tcgtctgacattcctggttgtggggaaagggaacmctctcctgccctgctcatgtctgactagctacctgctgtaacaaaactagttttatttaccaaagattatcttatatcagataaacttgaaaacatgttggttatatttaaccattaaataatatatttggttatatttctgagtgttttagcaatacttataagygtttttttaagccaacttagaatagaactcatttattaatttggtaataccatcatgaagtgaggaaatgtcacataggtacaacgtacatacatatatacacacataaacatataaagatttatttattttaaaatttaatttatttaaagacagaaacagatagagattattttaagattttagccacaggtcaggta

SEQ ID NO: 1085 - DNA, 401 bp, Homo sapiens
ccttgagaagacagttttgggtggtagaatattttacagctgaaggaggaagagaaaggatgtaaactttcaagtagtccctttaaaagggagttttcgggcatttttgtctgttacagggttgctgcgtatcattgttgttattatcaattgttattttctgggacaaacagtaaattcttctggtagcactaagctttrtcaagcaggcattttaaaagtggggttggggggatgatttttgatgggtgtgaattttaagttcttgtctaaatctaatttatgcttgttaattttgttaagggagctatccagtctaaccatgatacacttgtttccttctttcaacttgatcctcccataggtagcaatacgatgtttatttagggtgagagctctct

SEQ ID NO: 1086 - DNA, 401 bp, Homo sapiens
agactctgccctcatgatggaaagtcattcccaaaaatagccaaagagaaagcgagctgagaccctcatggtcacaggcagcaaaaatggtgtttgtgaaaatggtatctccagcgttacacaaaagtgaggcacctgcaatcacagacttgtggacctgtgacacttgggaggcaatacggagatgggactttttcagcmctaataagacaatgaggaaggacaacaagtgccttgtatgagctgagacactttatttagacaaattccccagattgctgacatagccaggtgggaaattttgctagtgttttttagggtccttgactgacagcgagcacctccagactcaggcccaaccacctgtgcttcccagtgggcaaaaacacagacagaggtga

SEQ ID NO: 1087 - DNA, 401 bp, Homo sapiens
cgtagctaaaccagctaacacttttcaaccattaacaaagaatggtagagtggaatgtggtggcacatgcctatagtcctaactactcaggaagctgaggtaggaggactccttaagcccaggagtttgaggtcaacctgggcaatatacaatatagtgaggccctgtagagatctataatatgttctgctgtaaacatawgtccacaatataagggccatttttttttttttgagacagagtttcacactgtcgcccgggctggagtgtagtggtgcgatcgctgctcactgcaacctccacctcccaggttcaagcaattctcctgcctcagcctcccgagtagctgggattacaggtacctgccaccatacccagctagtttttttttttttgtattt

SEQ ID NO: 1088 - DNA, 401 bp, Homo sapiens
gttttttgtttgtttgtttgtgtgagacagagtctcactccgtcactcaggctggagtgcagtggggcaatcttgggtcactgcaacctctacctcccaggttcaagcaattctcaggcctcagcttcctgagtagctggactataggcacacaccaccatgcccaaataatttttatattcttagtagagatggagtctyaccatgttggcaacgctagtctcgaactcctgacctcaaacgatttacccacttcagcctcccaaagtgctgggatcacaggtatgagccaccgtgcctggcctatacttgtgtatactttgaattgtttcttttttcttttcctattttattttattttattttatattttattttattttattttttgygacagggtc

SEQ ID NO: 1089 - DNA, 401 bp, Homo sapiens
atggagtctyaccatgttggcaacgctagtctcgaactcctgacctcaaacgatttacccacttcagcctcccaaagtgctgggatcacaggtatgagccaccgtgcctggcctatacttgtgtatactttgaattgtttcttttttcttttcctattttattttattttattttatattttattttattttattttttgygacagggtctggctctgtcacccaggctggagtacagtggtgcaatcatgactcactgcagcctcaagctcctgtgctcaggtgatcagcctcctaggtagctgggactacaggtgaccaccatcacacccagctaatttttgtattttttcatagagatgaggtttcaccatgttgcccaggctggtctcaaattccca

SEQ ID NO: 1090 - DNA, 401 bp, Homo sapiens
accctgaaaaaaatctctggggagaggatcccaaagagacaaaggctaattttctcaccatgcttatagattaggggctttgagaaaatgagggtatgtttttaaagtattttaatagtggactgatctattttacctcctggaccagatgaaatgggaactgttccaattcatggagcaaccagacatacatgttcaaayaattatgaaaaacatacaacagatatttatcaacaaatacatcagtaaacaaacttacatgaccctgcttggccatcactgtttcttttcaacacacacacacacatttacaaatacatatatatgtgtgtgtgtgtgtctgtctgtcgatatatatgtgtatatatatatatatatatatatatatatataaataaaat

SEQ ID NO: 1091 - DNA, 401 bp, Homo sapiens
tttatttgttttagttttaagaatatccaaacaaagacggatacatgtgaaaacttgggacagtaaaattgtgacctttctataaagacaaagaggtaggaatcaagccaaagtgagattaggataatgtcaggtcttagtactctattctgcataatagtttattttaggtaattctctatattggttggcttgctgaarctggtgtgtgtgtgtgtgtgtgtgtatgcgtgtgtgcgtgtgtgtgtgtgtgtgtgtataaaaaatctttttagtcgttcttttttatttgtgcttctcaacatgcttaagcaagtgatatctttccatataaggggcaaaagaatttggggctgtgaggcaggctgacaaagaggaaatatatcctgtctaagcaagca

SEQ ID NO: 1092 - DNA, 401 bp, Homo sapiens
aagattgttccaggatttaaaaatttaagattactttggtttcttggaattatttaatacacactgcaattttccctgaaaaacacatgtaagctaaaatggctctatggaaatgttttatgttttaatgaggttgggaaacagagataaattcacctggtcataatcatatggtaaatattgatgaaaggaacctttttytaaactgcatagctataattctattccagctgattttgtagatttaaaatattttaccctgtttttgtgtctcttaaggagtttctgtttgggttatttgtacagatcaacagataaaaacttatgtcctagaacaaaaacagcacacttaaacacatcttttctttcaggccaaaaagtttgctgtttcaggaccatgg

SEQ ID NO: 1093 - DNA, 401 bp, Homo sapiens
atcagcaaagacaaaaatactgctacttaagtagtagtcactagaaaaataatttattttgttttgttaccttaactgtcagatttaagcacattcctaccaatatttgggtttgggctctgaaacccaaaacttttgaaagctttggaaaattttgtagaagttctttcttctgtcttttttttttttttttttttttgkatactattgccactgggatgcaagcattcataaattatgtttaaatataaaaattaggtcggtaactctctgctcgtggattcctgaaacacaatgtacaaaaacccagaatagatcttcgtggctcactttagagcgtaacagcactgggaggtgatctgacttttcattttacacgcaagaaactgaggctggagaga

SEQ ID NO: 1094 - DNA, 401 bp, Homo sapiens
atggtcaaaggagtttgagagaaaataaataatatatcccttttcggggagtcagagtacaacagcatattcaagatgctgagaaatcctgtgagattaaagataatgaaaagcctgtctttatttcacctaatattttccaaatttatttgaatgtggaacacattgctttgttacctcatgtttacctggttgacatcsaktcccgactagcgcagttaacttttctttttctttttctttgaccaagtctcactctgtcacccaggctggagtgcaatggtgtggtctcggctcactgcaacctctgcctcccggattcaaatgattctcccgccttagtctcctgagcagctgagactacaggctcatgccacacacctggctaatttttgtatttt

SEQ ID NO: 1095 - DNA, 401 bp, Homo sapiens
ggtcaaaggagtttgagagaaaataaataatatatcccttttcggggagtcagagtacaacagcatattcaagatgctgagaaatcctgtgagattaaagataatgaaaagcctgtctttatttcacctaatattttccaaatttatttgaatgtggaacacattgctttgttacctcatgtttacctggttgacatcsaktcccgactagcgcagttaacttttctttttctttttctttgaccaagtctcactctgtcacccaggctggagtgcaatggtgtggtctcggctcactgcaacctctgcctcccggattcaaatgattctcccgccttagtctcctgagcagctgagactacaggctcatgccacacacctggctaatttttgtattttta

SEQ ID NO: 1096 - DNA, 401 bp, Homo sapiens
atgcctccagctgagtgggggctggggcacatatccactgctgtgtgtgttggggttagtgagggcagatgggctcagccccatgggaaccacatggtgtagaatcattacagagaggagagttctgtagcaaaagaagggaaaagtgagctagacaggaaaacaacaacacaatcattgacaactgataagcaaacaacyttagaaaaatcagaaaataggtattagtaacagaattttaaaggaaaattaaaaataggtgttgttgaaaattgtgtttcattgggcagacaaaactaagcaggatgagcaatctgaagaaaataataagctggaaaactgaatataattgcagtatcatttttttaaaagactcattagtacctatgagccattataat

SEQ ID NO: 1097 - DNA, 401 bp, Homo sapiens
ggttgggagagggggaggaaagagagagaggagagaggacgggcttggatgaagaagggaaagaaagagaaagagactgaagcagagaagagccgcagaggaagaaagtgaatgagcactcaagaaggacaaagaggagtagtcgggggtggggtggaggcagggcggggaagggagtgaccgcccctcctggctgcactmttgcctccggagccctctgatcctgtttgcagtgatgctccgagggcaggcacctgctgctctgtaatgattcagcccctttcagccgtcgtcgcgttaacacaacaggatgctgttgctattgtcactactgcctctcctgccgccgctgctgctgccgccgccgccaccgccgctggtcctccttctgcttttacttc

SEQ ID NO: 1098 - DNA, 401 bp, Homo sapiens
ctgaaccagtgttgtaacagcagctctctctagccacatggctcaatctggtaccgggaatgaaaaacttcagcatctgcaagtcatgcttgaatttaagttaaattcaatttatttctaacacattttaaaattaaaacatcacgccatctcttatgttttatagaaatgtgactttcatataccagtgagtattatttkgtgtctttctcttccccatcatagatttcctgtcatctctctgttaccctctacctctcagcgaccccaagctgcctgtwgtctctctctccttcccgttccctaaccacttctccctacttttgtatcttaattggttctttgagattacagcaagtcttaagacatttacggtgctagcctctcactagcttgagacg

SEQ ID NO: 1099 - DNA, 401 bp, Homo sapiens
aagtcatgcttgaatttaagttaaattcaatttatttctaacacattttaaaattaaaacatcacgccatctcttatgttttatagaaatgtgactttcatataccagtgagtattatttkgtgtctttctcttccccatcatagatttcctgtcatctctctgttaccctctacctctcagcgaccccaagctgcctgtwgtctctctctccttcccgttccctaaccacttctccctacttttgtatcttaattggttctttgagattacagcaagtcttaagacatttacggtgctagcctctcactagcttgagacgactgctgtcctgcccagatggcactttcagttagtgagcacttactagtggcagctttattttgtccaggacacagtagg

SEQ ID NO: 1100 - DNA, 401 bp, Homo sapiens
cacagtaggattctgcatgaaggattttcccaaattagttttgtcttctataatcaaatgtttaaatagcttccttggcagttgttaaaaagtacaagatccattagtgaggtacatctttttttttttttttttttttgatgtatgtcatcttagtctggcagattgcagcggcccagtttaataacctgtgatgtgcaragagcccacgctcttaaaaacaatacattcctgtttgcattgmgtaattgcaatagctttagagtggaaagttgacaggaatgaaagcatgactgttctaaatatcaatatagaagggaggagttttctgtagccttttaaaaatgtttctagtttatttttgttgtctctatctcctatcactttttaccatgaggaat

SEQ ID NO: 1101 - DNA, 401 bp, Homo sapiens
tcttctataatcaaatgtttaaatagcttccttggcagttgttaaaaagtacaagatccattagtgaggtacatctttttttttttttttttttttgatgtatgtcatcttagtctggcagattgcagcggcccagtttaataacctgtgatgtgcaragagcccacgctcttaaaaacaatacattcctgtttgcattgmgtaattgcaatagctttagagtggaaagttgacaggaatgaaagcatgactgttctaaatatcaatatagaagggaggagttttctgtagccttttaaaaatgtttctagtttatttttgttgtctctatctcctatcactttttaccatgaggaatatttacttagtagaaaagtacaagatcagaaaatttggttctt

SEQ ID NO: 1102 - DNA, 401 bp, Homo sapiens
tgaggaatatttacttagtagaaaagtacaagatcagaaaatttggttcttaataacttgcatgaaagctcttagggttaaaagagagttgacaatttctctgacgaaatgcctcttgtttttcctctggacagtaatgaagaataaagaataccttttccagacatcatgttcagtgtgaagtagtgcagcatgctgtaraaacacagaaaaacttgatttgtgcttgtaactcccgatcatttcacgaacaccagattcagtggcaaagatttaaagaaaaaaaaagtcttgttttctaggtgcaattagggaaaacctccttcatgcagacgctgctttgtatctttatcaaatccctgaagcatcattaaaggtctgacagacatcactgcctttgc

SEQ ID NO: 1103 - DNA, 401 bp, Homo sapiens
cagacatcactgcctttgctgcctcttcccacctggcaaagtgactgggaaataatacccagatgaaatgacaggctataaaaagcaagtacagatcctgcaaaaagaagcgaaattcaccaggaggacaaggttacttgatcattttaaacttgtctttaattgaaatctgcttgaacaggtttcattgtccagagaaaraaaaaaatgccctttgaaaaacacttcaactaaattctataattttgtcatctgaggaaatcaggaaaacaaagaaacwtctaacacattttcctgatctaagaccatgtcagaaagtatgttgtgaagttttgataaattattttataaagtaaatttttctactaagtgttttagtagattacatattccttatcagt

SEQ ID NO: 1104 - DNA, 401 bp, Homo sapiens
aaaaagcaagtacagatcctgcaaaaagaagcgaaattcaccaggaggacaaggttacttgatcattttaaacttgtctttaattgaaatctgcttgaacaggtttcattgtccagagaaaraaaaaaatgccctttgaaaaacacttcaactaaattctataattttgtcatctgaggaaatcaggaaaacaaagaaacwtctaacacattttcctgatctaagaccatgtcagaaagtatgttgtgaagttttgataaattattttataaagtaaatttttctactaagtgttttagtagattacatattccttatcagtttttttttccccaagccagggcattgatattgtggcatctgcaataaatgggaaagatttactgctgcctaaaagcatc

SEQ ID NO: 1105 - DNA, 401 bp, Homo sapiens
actttttttgggggtggggagaggttgttgtggggagagtagtgtttgaaagggattggtccaggcagctttgtttttagagacttgtaagtggttgtttttgttgttgtttaaaaaggttgtaaccactaattaatggaaagcaaaaaaaaaaaaaaaaaaaaaaaaaagcttacaaagggattgtatttttcaactaaraaagtattgtttagtcacagaaagaactgggacgttccttttcccgtgcatgtttttgacataaactaagctgtcatggcttatatttgaaaatgacattatcatatgtgaaacatgctcttcagtggttttaggactttattctcccgtttccatttttttttctgtctcascatattcagcacattatgcacagagct

SEQ ID NO: 1106 - DNA, 401 bp, Homo sapiens
tacaaagggattgtatttttcaactaaraaagtattgtttagtcacagaaagaactgggacgttccttttcccgtgcatgtttttgacataaactaagctgtcatggcttatatttgaaaatgacattatcatatgtgaaacatgctcttcagtggttttaggactttattctcccgtttccatttttttttctgtctcascatattcagcacattatgcacagagctgtagccttcaaggtcwtagactgttgaaggctaattgattcttctttatcctggagcctgagagagtagaagagagacaatcccagtaattgtgtctgcagcgttgctccccaaaccaatctaccwactaatgttagagttttattttataaatactagaattactccctcac

SEQ ID NO: 1107 - DNA, 401 bp, Homo sapiens
cacagaaagaactgggacgttccttttcccgtgcatgtttttgacataaactaagctgtcatggcttatatttgaaaatgacattatcatatgtgaaacatgctcttcagtggttttaggactttattctcccgtttccatttttttttctgtctcascatattcagcacattatgcacagagctgtagccttcaaggtcwtagactgttgaaggctaattgattcttctttatcctggagcctgagagagtagaagagagacaatcccagtaattgtgtctgcagcgttgctccccaaaccaatctaccwactaatgttagagttttattttataaatactagaattactccctcactgactcttgtcaaattacaacattctttgtctttgttataata

SEQ ID NO: 1108 - DNA, 401 bp, Homo sapiens
tggttttaggactttattctcccgtttccatttttttttctgtctcascatattcagcacattatgcacagagctgtagccttcaaggtcwtagactgttgaaggctaattgattcttctttatcctggagcctgagagagtagaagagagacaatcccagtaattgtgtctgcagcgttgctccccaaaccaatctaccwactaatgttagagttttattttataaatactagaattactccctcactgactcttgtcaaattacaacattctttgtctttgttataataaaaggcaaaatatgacattttaaattgccttaaggtatagtggctatgtcgaattttctaaaatgggtatttctttcataaagtaatatttcatattttcatgatattaa

SEQ ID NO: 1109 - DNA, 401 bp, Homo sapiens
tgtctgggctttaaaatttttcctaccctgactgttgggagattgcaaacttagattatcataaaaagagctgattaattaaattatagccaggaaacagtggtaccatcttgaaagaaaatgttttctggatatgagatcctccctgcttgacaacagattcttggatgcaagaatgtgttggtattttcatcttgggcyaactttgttttgctttgtcctaagtcttattatgggattgtatgacaaaccattgttaccgcagtgacaataagaatcagtaaccatttgcaaaagatcaacatgatgagttggatataccataggatttctttccttctatttgaaagtgccgttcatttaaattctaatgcatccttcttctagttcttggtaactat

SEQ ID NO: 1110 - DNA, 401 bp, Homo sapiens
tagatcatccatactttgttcagcttgcttctgaaaacagcatgggttgcctagggtgagttcttccctcatatatagcagattgctctgtggctcacttcttttcttcataacccattttgttttctcctctctattcttttgtgatacccaactcagacttcttctcccctttccttcctaccttcccaattatgtatwgactcttttttatttttgtaattatgtcattttggctttataggtcagtatttcattgcatcatatcaaaataatttcaactrtctttaatgaaactttattgcattttaatgctgaatggcactttcatatattacaaacatacaaaaaaaatctctagccaatgaccaatataccagtttcttaatgacataattaaa

SEQ ID NO: 1111 - DNA, 401 bp, Homo sapiens
tgctctgtggctcacttcttttcttcataacccattttgttttctcctctctattcttttgtgatacccaactcagacttcttctcccctttccttcctaccttcccaattatgtatwgactcttttttatttttgtaattatgtcattttggctttataggtcagtatttcattgcatcatatcaaaataatttcaactrtctttaatgaaactttattgcattttaatgctgaatggcactttcatatattacaaacatacaaaaaaaatctctagccaatgaccaatataccagtttcttaatgacataattaaatcaaatttttaccttcttcttgatcttttcctcttttttttctttagtgtgcttgattccagtttttctgtttttggacatca

SEQ ID NO: 1112 - DNA, 401 bp, Homo sapiens
cctgagaaccaggaatataacttgtccacagagtccattgaacgttctactacagcataaactacattccgtctacttttatgctcatgtttctacttttattacttttgctctacatcaatgctttgtttttcttctattatttcctctttggtttttttttgtttgtttgtttgtttgtttgtttttcattcagtgaaygtacgctaagtgcctactctgtgccagactctgttctagaccggttatatgacagtggaaaacagtagagtgcctgccctcagggagcttatgttctagtggattttaagaatctaattgcataatgcaatttgagatatttcttgctttcttatacatataccctcttcattcagcatttcttcttctttactgtcatg

SEQ ID NO: 1113 - DNA, 401 bp, Homo sapiens
acctttataatattgatatgtataagacacccctccggaggctggacatctgtctcccaacaatataatatatgagaaaatgttttaatgatcaacgttatcccaactgaaatgcgttacatacttagaaagaaattagttccttagtgcttaaagtattcaagcagtgacactgttgagggagatttatgttcctagcarattattaactatatttacttctgaagtctcttacaactctggttctctcagtttattgtctcagggtgttagctttccagtgggtaracttgactttcaatcctacttgtccctcttcatggccttgagcaagttagaccatcatgttaaatctgtttcctcatttaaatgtgataataataataatatacatgtcttga

SEQ ID NO: 1114 - DNA, 401 bp, Homo sapiens
atgatcaacgttatcccaactgaaatgcgttacatacttagaaagaaattagttccttagtgcttaaagtattcaagcagtgacactgttgagggagatttatgttcctagcarattattaactatatttacttctgaagtctcttacaactctggttctctcagtttattgtctcagggtgttagctttccagtgggtaracttgactttcaatcctacttgtccctcttcatggccttgagcaagttagaccatcatgttaaatctgtttcctcatttaaatgtgataataataataatatacatgtcttgaggctgttaggagattaaatgaggttttggaaaactccaagtcctaggcctgagacataaaaaatatgaaaccagcaccaattttgtc

SEQ ID NO: 1115 - DNA, 401 bp, Homo sapiens
ttagaccatcatgttaaatctgtttcctcatttaaatgtgataataataataatatacatgtcttgaggctgttaggagattaaatgaggttttggaaaactccaagtcctaggcctgagacataaaaaatatgaaaccagcaccaattttgtccctcattctattttaactccctgcctcactttgttctttttctcctytgatcttgacagtggtttggtaacaatgcctggagaatacattttggggttttaggggaaccttatgaaaaactttgaaggaagtgaagagttgatgatacatcatgctaaagtaggaattatgctagaaactcgagatcaaataccagctctacctcttgcatgctgtgtgactttgaggaaatcacttcacttgagat

SEQ ID NO: 1116 - DNA, 401 bp, Homo sapiens
gggtataagttttctgactgtacaatggaaataagctgatggacccaataaaacttggtgaaataaaatggaaagcttcctcaggtaaaatattttaaatttttcatcagaaacatgataggacaagacttgatttactgtgattttcagtgataggcacttagtgtttgagttgcatttcatgaggtggttgtctcccarccaaaggagaaattcatgaactctctttgaagccagagttagcacagaatttaatatgcatgtaattatcaaatgtaaaaatcttcataatttattttagtttaaaagttattaatttaaaattaaaccaaatgtacatatatgcatatgcatttggaagaaagatgagagcaacactgaagacaatgatagttgccatt

SEQ ID NO: 1117 - DNA, 401 bp, Homo sapiens
ctagtgactactgtcattttaaatgggatttattgaatataggatcttcacaatgttgaatactgtgatgtctttaggacatagttgggttatgttataactttgttgacccctgttatttcgttaggacatactgagttgtattagggattctagctcttttactaaataacccagacctacgtatgttctgattgtatkttgggttattacataatcaaaattagcattacagagctttaagccaccttagagacactttgaaccaaatctcttattttatcacagagagacaagcccaaagatgttaaccttcttgccagagaccacatagagccagaaaatgttgatattttcatctcttctaggctttcagctaccaggtcactttgcaaccagtg

SEQ ID NO: 1118 - DNA, 401 bp, Homo sapiens
tttagccaactagaactcgaccctgaatattattttttctcttccatgtttttgctcattctattttttctactataaatgtgctcttcaaacagtctctcctctcccaaattctacttaggcctcaagactcacctctccaaattagatgatgggacccctcttcttgaagacctcctccaaccccccataacctattgsttgtgctttatcacatttagatttgtgtgttcttatttggatgcttgcttattgctcatagtagactgaccatttcctaaggcccagagttatagctaactcatttttatgacctgtatagtaccaaacagtgtacaggttgagcatcccaaatatgaaaatttgaaatctgaaatgctccaaaaatccaaaactttttg

SEQ ID NO: 1119 - DNA, 401 bp, Homo sapiens
ctgtatagtaccaaacagtgtacaggttgagcatcccaaatatgaaaatttgaaatctgaaatgctccaaaaatccaaaactttttgagcatcaccatgatgttcaatggaaatgctcgttggaacattttagattttggattttcagtttggagatgctcagtggtaactataatgcaaacattccaaaatccaaaacamttctggccctaagccttttggataagggatactcaacctatattttatatgaagtaggtatctcattcgtatatttatggaataaaagttacactgagggtaacttgcttatgggagtggaagaggaagaaaataatctgaaaccgggtcttaaatcactgacattttaattttgaagaattcaatatagagtttagtca

SEQ ID NO: 1120 - DNA, 401 bp, Homo sapiens
ggctttaagtcccagccctgtctccggctgtgtgacagcatgcacactatgaactatctgtgccccgattttctcatctgtgaaatggtggcaataactatactttcctcaggggctttttgtgaggatcaaatgagttggtgttcataaagtgtttggaatagtctctggctcatagcgctatataagcatgagctgtcrttactaggcagttttaacaattaaagtgcatttccttagatttcaagtttgatagcttgtgattacaataacaggcttcaggaaagggccaggaattccaagggacctattgacacagctatggatgtgctactatttattttggtttggtttgttcatgtggtttttcctctgtgtgatttatgtgttaccatcatacc

SEQ ID NO: 1121 - DNA, 401 bp, Homo sapiens
attccaagggacctattgacacagctatggatgtgctactatttattttggtttggtttgttcatgtggtttttcctctgtgtgatttatgtgttaccatcatacctgcattgttctcaggatttaggagaacagaaaaggataatcatcaatctacctgtcagtcagaaatagagcgacatggatggtttgaataaaaaygctgccctctctggcaaaatgccatctgttgacattgacatggacaatcatatatgtgtatatctgaatttattgctgtaacttcttattctgtcataaaatggtggacaaattcacaaggagaaaagtaacttatcttagttgttgaagaactgttgcaaaggctttgaattctgcaatgctatcattttaccaagaca

SEQ ID NO: 1122 - DNA, 401 bp, Homo sapiens
ggctggtctaaaaaacaggaatgccacttcatttagggctttttttttttttcaatatcccatgctgcttcttataaattagataattctttaatggtggaagactttattttttctgttgttctatattctttattgagtgcctgctcaatagagaagagtttacctctaaaaggagaacaaacaaaagaataataaacmagaaatcatatactatcttagcaggcrtatggggaaaataagtgtgaggagatcagagtactggtggaggagcatagttattttaaatagattaaaaggtacaaacatacagtctgatagaagaaataacacctagtgtttgatagattagtagggtgaccatcgtttctaagagtctattgcatgtttcaaaacagtta

SEQ ID NO: 1123 - DNA, 401 bp, Homo sapiens
ttcatttagggctttttttttttttcaatatcccatgctgcttcttataaattagataattctttaatggtggaagactttattttttctgttgttctatattctttattgagtgcctgctcaatagagaagagtttacctctaaaaggagaacaaacaaaagaataataaacmagaaatcatatactatcttagcaggcrtatggggaaaataagtgtgaggagatcagagtactggtggaggagcatagttattttaaatagattaaaaggtacaaacatacagtctgatagaagaaataacacctagtgtttgatagattagtagggtgaccatcgtttctaagagtctattgcatgtttcaaaacagttataagagaataatttgaatgtcctagca

SEQ ID NO: 1124 - DNA, 401 bp, Homo sapiens
tctttgaaaaagtaacagctgatgaaaggcttgaatgaattaatggagttaaccatatggccatatggaagaatgttccagactctgggaaaaggccttactgcccaggcagaaggccagtgtagtcaacttaagccaatggcttaagtgtagcatgggaggcaggaggtattaaatgagatcagagaggtgatgaaggcytgatcagggaagcatgccattcattgtaagaatgatggcttttccaccgaaagagatgaggaattattgcagagttttgagtgaccatgggacttgatgccttaggttttaatgggatcactgcctgctgtgttgagaatagcttgtggagaaggatcccaagatcccggtggaaatagtcggaccactgaggagattgt

SEQ ID NO: 1125 - DNA, 401 bp, Homo sapiens
aaggctgatttcagtctaagtagttgaaaggatacggttatcaccaactgagatggagatgatctaaagatcattttgctcagtctcccaatgcataggtgccaaataaatcaaggttcttatcaaaattagaactgtggacattaccttctcataaaaataaagcgagatatgcctgagagcctcctgtaaatcaatacrgctttatgtgtgactagagatccttataaatacaaaagaaaagttgcagtgaaattgaggatgtctgcctagactactcggtaacactatccagaacccacaacacgtgatgatggaatgaagtcccagggggatgtagaataggcttccaacaaaccactttattcctattttatggtttctttttaattcatcttgtt

SEQ ID NO: 1126 - DNA, 401 bp, Homo sapiens
cagctcactttcagtcatcttttaaactttatttcagaagtctactcatcttagaaatgtgcactttatccctaaggtgagctaagtactttcctctctttcctctaggctttgacagtatccagtattttccacccgtttcccatgtactctgctgacatgcatgtattcctcaaggtcaagcatttcttttatccatgwacagatgcttcacatagcaccatgtatactataagctctaagactttgaagtacttgcatgtcccaggtagaggtttttctcctttctctattaagctgtcaattttctatatttatgatgaaaatacacagcaaaagtagtgtaaatgcttattttacttctcaaattactcgtcaagttgccaaggtgccaactattt

SEQ ID NO: 1127 - DNA, 401 bp, Homo sapiens
ctacttcactttctggaaagtaaaaagcagcaaaaaggaggttatcaagagaggagaagcaggaaaagttctagacagtctacttcatttttctcatattctagtactctagacagggtgaaggctcctgttgcagaagtgatggtcacatattcctgcaaataccaagtactcagttcagcccgtgcctgcagtctcttwacatccctgtcctcctctgcttctcaaattttacctactatgcaaagtcttgatcaggttccactcttctttagagacatttcctatactctgtggtcatcattaaactttcctccttagtctctattccagcagctcgaatcatctttaatactcatgtgtgtatttaaacatccatcctaccacataggtgtttgatt

SEQ ID NO: 1128 - DNA, 401 bp, Homo sapiens
atcattaaactttcctccttagtctctattccagcagctcgaatcatctttaatactcatgtgtgtatttaaacatccatcctaccacataggtgtttgattcagtcatgtgtgttttatattatgaattaggttttaagtctcatctttggttttatttacctcctcatacctagaaaaacagattaagcacttgttctytacaaggccctgggttcagagtagtagaattgagagagacagaaagagctagtttctgtcttccaggagcttggtttcatcaaagacataaaagccttgccattaactggagtataaggtagtatatgagatgtatgaagaaaaaatcctttagtttgaggtgaaaaaaaaaaaccaaaaaggaataaggctaagaagga

SEQ ID NO: 1129 - DNA, 401 bp, Homo sapiens
gtagatttatgacaggaagtgacttgtgctccaatttccagaaaacattcattacttcttcctgatgaagctgctcagttaaataatattaattgttcttcccctgatgttatacaaaaattaaaattgatagaatacagaacttaaaagacatttttactttactttttgacattattcattgtttgttgctgatgaatkaaacctcttttcgagtgtgtgttccctttaataggcactggtaatttatgtactaagatttatttctgtatggaaattacaagtgaaatttcatattgaatttatatttagcctgttctagtacatagtctctgcatagtatatccatggcatcctacttaatattacagattcttttatattagtgctgctacatgtgt

SEQ ID NO: 1130 - DNA, 401 bp, Homo sapiens
taactgaagtgaaaaacccttctggaaactgtatatatgaaaagattccatttagatccattgaattttgcctttcattttcaaacttgcaaatagaagcagcattttaatatttttcaagagggggaaaaaaaagagcgtggttccctggccctattgtatcacttccattttgtctggaactgatttcatgcaggagakgcactggaatcagcatgcaaattctatgtggctgttgttcagtctgtttttgattcatcgtggtaaaatatgcataccatgaaatttgctgtcttagccattgttaggcgtacagtttggtagtgtcagatgtgttcacattgttgtgagaaagagctccagactttgtcatcttgcaaacatgaaactctgtacccatt

SEQ ID NO: 1131 - DNA, 401 bp, Homo sapiens
catttcatcgctgtacgaacatcatagagtgacttaacacaagccttgatggtatagccaactacacacctaggctaatcgatagaatcttttgctcctaggctacaaactgtgcaagtatgttactgtactaagtagtataggcaattgtaacacaatcgtaagtatttatatatgtaaacatatctaaacagagaaaargtacagtaaaaatacagtattataatcttatgggaccactgtcrtagatgcagtttcctgttgaccaaaatgtccttatatggcacgtgatggtatatgccatattttgtttawctcttcttgcatcagtgaacacttgggttacttccacctcttaaccggttaataatactgatatgaacatgggtataacattctaa

SEQ ID NO: 1132 - DNA, 401 bp, Homo sapiens
cttgatggtatagccaactacacacctaggctaatcgatagaatcttttgctcctaggctacaaactgtgcaagtatgttactgtactaagtagtataggcaattgtaacacaatcgtaagtatttatatatgtaaacatatctaaacagagaaaargtacagtaaaaatacagtattataatcttatgggaccactgtcrtagatgcagtttcctgttgaccaaaatgtccttatatggcacgtgatggtatatgccatattttgtttawctcttcttgcatcagtgaacacttgggttacttccacctcttaaccggttaataatactgatatgaacatgggtataacattctaattawgttttgttcatctgtggtgggtgtgaaagttaaaccaatg

SEQ ID NO: 1133 - DNA, 401 bp, Homo sapiens
caagtatgttactgtactaagtagtataggcaattgtaacacaatcgtaagtatttatatatgtaaacatatctaaacagagaaaargtacagtaaaaatacagtattataatcttatgggaccactgtcrtagatgcagtttcctgttgaccaaaatgtccttatatggcacgtgatggtatatgccatattttgtttawctcttcttgcatcagtgaacacttgggttacttccacctcttaaccggttaataatactgatatgaacatgggtataacattctaattawgttttgttcatctgtggtgggtgtgaaagttaaaccaatggaacctttttttagtgaatttagtcaaatttctgaaaamcaagaattcctatggaaacatactgataaac

SEQ ID NO: 1134 - DNA, 401 bp, Homo sapiens
cagtaaaaatacagtattataatcttatgggaccactgtcrtagatgcagtttcctgttgaccaaaatgtccttatatggcacgtgatggtatatgccatattttgtttawctcttcttgcatcagtgaacacttgggttacttccacctcttaaccggttaataatactgatatgaacatgggtataacattctaattawgttttgttcatctgtggtgggtgtgaaagttaaaccaatggaacctttttttagtgaatttagtcaaatttctgaaaamcaagaattcctatggaaacatactgataaacatacttttcttattatatattaaaaatgcttgtagggaaaacccagcttctaatagtactctgggtttgtgaagatgcagtaagtgcttg

SEQ ID NO: 1135 - DNA, 401 bp, Homo sapiens
gcacgtgatggtatatgccatattttgtttawctcttcttgcatcagtgaacacttgggttacttccacctcttaaccggttaataatactgatatgaacatgggtataacattctaattawgttttgttcatctgtggtgggtgtgaaagttaaaccaatggaacctttttttagtgaatttagtcaaatttctgaaaamcaagaattcctatggaaacatactgataaacatacttttcttattatatattaaaaatgcttgtagggaaaacccagcttctaatagtactctgggtttgtgaagatgcagtaagtgcttgctaragagatgtttttaatctagagagctagagcagagacttagagttcacttgtttcttctctttttttcaatcattt

SEQ ID NO: 1136 - DNA, 401 bp, Homo sapiens
ttgttcatctgtggtgggtgtgaaagttaaaccaatggaacctttttttagtgaatttagtcaaatttctgaaaamcaagaattcctatggaaacatactgataaacatacttttcttattatatattaaaaatgcttgtagggaaaacccagcttctaatagtactctgggtttgtgaagatgcagtaagtgcttgctaragagatgtttttaatctagagagctagagcagagacttagagttcacttgtttcttctctttttttcaatcatttataagatctctcatcttaactcattaaaactggctgattgactttgattactgacacacccaaactatttcaaaccagttagttcaaaaatgcagttgcctctttgaattatttataaaaaggat

SEQ ID NO: 1137 - DNA, 401 bp, Homo sapiens
agagctagagcagagacttagagttcacttgtttcttctctttttttcaatcatttataagatctctcatcttaactcattaaaactggctgattgactttgattactgacacacccaaactatttcaaaccagttagttcaaaaatgcagttgcctctttgaattatttataaaaaggatctcattacatttttccatarataacgatgatggcaaaggggaagaagggatcattatgccactcctttaaaatgcgggcttctggcctggcacggtgactcacacctgtaatctcagcactttgggaggccgaggcaagcggatcacctgagggcaggagttggagaccagcctggccaaaatggtggaaccscatctctgctaaagayacaaaaattag

SEQ ID NO: 1138 - DNA, 401 bp, Homo sapiens
aaaaggatctcattacatttttccatarataacgatgatggcaaaggggaagaagggatcattatgccactcctttaaaatgcgggcttctggcctggcacggtgactcacacctgtaatctcagcactttgggaggccgaggcaagcggatcacctgagggcaggagttggagaccagcctggccaaaatggtggaaccscatctctgctaaagayacaaaaattagccaggtgtaatggtgggtgcctgtagtcccagctacttgagaggctgaggcaggagaatcacttgaacctgggaggtrgaggttgtagtgagccgagatctcatgactgcactccagccagggcgacagagtgagactccatctcaaaaaaaaaaaaaagtgacatgctggtt

SEQ ID NO: 1139 - DNA, 401 bp, Homo sapiens
atttttccatarataacgatgatggcaaaggggaagaagggatcattatgccactcctttaaaatgcgggcttctggcctggcacggtgactcacacctgtaatctcagcactttgggaggccgaggcaagcggatcacctgagggcaggagttggagaccagcctggccaaaatggtggaaccscatctctgctaaagayacaaaaattagccaggtgtaatggtgggtgcctgtagtcccagctacttgagaggctgaggcaggagaatcacttgaacctgggaggtrgaggttgtagtgagccgagatctcatgactgcactccagccagggcgacagagtgagactccatctcaaaaaaaaaaaaaagtgacatgctggttaaaggtccctgtccat

SEQ ID NO: 1140 - DNA, 401 bp, Homo sapiens
actcacacctgtaatctcagcactttgggaggccgaggcaagcggatcacctgagggcaggagttggagaccagcctggccaaaatggtggaaccscatctctgctaaagayacaaaaattagccaggtgtaatggtgggtgcctgtagtcccagctacttgagaggctgaggcaggagaatcacttgaacctgggaggtrgaggttgtagtgagccgagatctcatgactgcactccagccagggcgacagagtgagactccatctcaaaaaaaaaaaaaagtgacatgctggttaaaggtccctgtccatatcccccttttgcaactatttaatccccagcaaagtcctagccaggatttcctggtaagagtttttctgctctgcgttgtcaacagact

SEQ ID NO: 1141 - DNA, 401 bp, Homo sapiens
tgagttactagtttcaccacacagctgtctcacccagtatcttggaactgtttcttgcttcatgtgtgtgaaaaatatagtaaatttcctggtcatattttagcataattaattataccaactattaatttaatattttgtttgatttttagtttccagggtaaaacattaattttctctttaatttccattctataagawtcctattgttttcagcaaataggagtttccttctctgtaagcattgctgactcaagactatataatgttagaaatagaaaaaagatragaacatgttagtatcaatagcctttattattataatcggtatgggcctaacttctgctagcaacattaaaaatcttttcttttactctatcatttagtaacggattttcttt

SEQ ID NO: 1142 - DNA, 401 bp, Homo sapiens
cctggtcatattttagcataattaattataccaactattaatttaatattttgtttgatttttagtttccagggtaaaacattaattttctctttaatttccattctataagawtcctattgttttcagcaaataggagtttccttctctgtaagcattgctgactcaagactatataatgttagaaatagaaaaaagatragaacatgttagtatcaatagcctttattattataatcggtatgggcctaacttctgctagcaacattaaaaatcttttcttttactctatcatttagtaacggattttcttttggttgtgtcgaatagaattgtttccttgatgttccttgatagagagtgttctctttaatataggaatacagtaaagaaagcatcca

SEQ ID NO: 1143 - DNA, 401 bp, Homo sapiens
atagagagtgttctctttaatataggaatacagtaaagaaagcatccacagtttgtgaggcagagtttagtgctgatgtgtacagaaactcaagtgatatttagacaactgagtccttactgggaatcacttaagccttaaaacatctctgccattatgctgcttattttacattgttctggatagatgctcattatccasttctcattcatgatgagcatgggattgataagggagctgacatgaaaattatggagaaaaaatgcaaatagcaaaagatagaataaagcatgtatacctcatgatcattttccccattgatattgatttggactcactcttgatgtatcaggtgtgttcaatctttggcaaacatttagggttttcgtttttgctgaggt

SEQ ID NO: 1144 - DNA, 401 bp, Homo sapiens
gatagaataaagcatgtatacctcatgatcattttccccattgatattgatttggactcactcttgatgtatcaggtgtgttcaatctttggcaaacatttagggttttcgtttttgctgaggtccacttgaaccctggagcccaaaagaagtaaccaaaaatttctatagcttagtaaattccatgttctagaacttttmatgtggacctcagaaaaaggaaataaccaagagtgccgaaagctacatgtactttgaattgttcagcatgtataaaacccaatggctaaccgtgtctagaaagaaggagataagtaaagtaagattggagcctggcgtttggagttcagcaacttttctctgttgtgcgctgacatttaagttaatagagtgatttctgg

SEQ ID NO: 1145 - DNA, 401 bp, Homo sapiens
tggagcctggcgtttggagttcagcaacttttctctgttgtgcgctgacatttaagttaatagagtgatttctggtggatttctttgaaacaagacagttcatctgagatttggttaaaaaatatttcattactttgaggaagtgattagggttggtcttatttagttggggctttcaaaattgatagttttgcctgatgrtatatgctaaaacattgaattgtgagtttcctagccagactggaccctaagcccatcatttggaaatagtctttcttatttttgttattcttgtatttattaaagaacattggactagtgaaaattacaaaagaaaggaaaatgacacaatacactacattctgttgtatcccatttctatctcakggaattatgtgtgt

SEQ ID NO: 1146 - DNA, 401 bp, Homo sapiens
agttttgcctgatgrtatatgctaaaacattgaattgtgagtttcctagccagactggaccctaagcccatcatttggaaatagtctttcttatttttgttattcttgtatttattaaagaacattggactagtgaaaattacaaaagaaaggaaaatgacacaatacactacattctgttgtatcccatttctatctcakggaattatgtgtgtttaccaaactgatgtctagatgaacattcaatttcgtatcttgccatttaaaatttaacatcatgtgcatttttatgtcattaaatgtccaaacacctggaatttttacgtttgatttgttattgctaaaaagtacttctcttgatttttaggggttttcacttttaattaaaacatattcttgaa

SEQ ID NO: 1147 - DNA, 401 bp, Homo sapiens
tcttcttcattgagttttccaggcctctcttccttctgcacaggctccaaagagaatggctgactataagggttattagtgatattttgggagttattccgttcttatccactctcccaccaacacacacactctcacacctcctcccatcaaagcttgggatctctgggaacagggaaacatatcaagatattagaagaygtcaatgttatatatgcagaaatggtgaaaaatcaatgaatttagtaagttaaatttgtttgggtagcattttaaaaatatttaagtactttgacatatgttaccccctaatacacagagggtgctcagacagcatttgctacaggagtgaaccctggccaaagctgttttaaccaagggacagtggargcccagagagg

SEQ ID NO: 1148 - DNA, 401 bp, Homo sapiens
atattagaagaygtcaatgttatatatgcagaaatggtgaaaaatcaatgaatttagtaagttaaatttgtttgggtagcattttaaaaatatttaagtactttgacatatgttaccccctaatacacagagggtgctcagacagcatttgctacaggagtgaaccctggccaaagctgttttaaccaagggacagtggargcccagagaggttcgttggtttgcttaaaatcacacatccatgggtaagcaaggtgatggataatcagctcaattgagtcagtttacattgtatacacataacaaagcatcatgttgtgccctgtaaatgtatagaattatgatttgtcagttaaaaataatattaataaagtaaataaaatcacacatctcacattgag

SEQ ID NO: 1149 - DNA, 401 bp, Homo sapiens
tccatgggtaagcaaggtgatggataatcagctcaattgagtcagtttacattgtatacacataacaaagcatcatgttgtgccctgtaaatgtatagaattatgatttgtcagttaaaaataatattaataaagtaaataaaatcacacatctcacattgagaggagggcagcctagacccagatttctgttagccccargaattgaggcatatatgggagactagcagacaacacacataggaaacttttgccacttaattattattctttttctcaagaccactatattcatttgggtttgttcttatgcttttttttttttttagcaaattaaaaaaaaattatccttgaatgattctaggttagctttttgactaatggatgttggaaggagctca

SEQ ID NO: 1150 - DNA, 401 bp, Homo sapiens
ctaatggatgttggaaggagctcagtgacaaaggccagggattattttgcttttcctcacctcttcctttgttcctcctcatcatattacaaccttctgcttcaggattccttctgctttttagcaggattgacatgctgggccttacccggaaaggcaaaggctgatttgattagggaggtctttgttccaggtatctcrcatcagagagccttcataacaaatgagaggartggattagaagtttcctggggataattttttgtctaccctttaagggaaatcttgccttcattaattacatctcaaatggaatatgtggaatatagacattttcataatcaacaaggtgattttcattttaaaatgcttaaaaaatgttaagcagcatgtatgcacgc

SEQ ID NO: 1151 - DNA, 401 bp, Homo sapiens
ggccagggattattttgcttttcctcacctcttcctttgttcctcctcatcatattacaaccttctgcttcaggattccttctgctttttagcaggattgacatgctgggccttacccggaaaggcaaaggctgatttgattagggaggtctttgttccaggtatctcrcatcagagagccttcataacaaatgagaggartggattagaagtttcctggggataattttttgtctaccctttaagggaaatcttgccttcattaattacatctcaaatggaatatgtggaatatagacattttcataatcaacaaggtgattttcattttaaaatgcttaaaaaatgttaagcagcatgtatgcacgcacacacatgcaaccaatttcttscaccttttt

SEQ ID NO: 1152 - DNA, 401 bp, Homo sapiens
atgagaggartggattagaagtttcctggggataattttttgtctaccctttaagggaaatcttgccttcattaattacatctcaaatggaatatgtggaatatagacattttcataatcaacaaggtgattttcattttaaaatgcttaaaaaatgttaagcagcatgtatgcacgcacacacatgcaaccaatttcttscacctttttcttgttttaattcttaaaatatgaatttttaaatataaggaaaatcctaaaagcagaaactaataaatactaataaaatgttaattacattgattaaatcattagtattttaagatgggcccctgaaatgtctccataaataagcttaatgtgctttcatttaaacaacaattcagttagtaaattcaata

SEQ ID NO: 1153 - DNA, 401 bp, Homo sapiens
aaacatatttatgtgattagaaaatcattatatccactttaagtgaaaagaaaaagtcttcatttttgtgttacttttccaaacctccttttggcactgaattgtactttatgggggtgtcttgtcatttttttctaaattaactacacctctgcttgcctggaaactagagccattctgacttctattccgatatgtgtktttcatctcctactttttttttttttgagacagtcttgctctgtcgcccaggctggagtgcagtggcacaatctcggctcactgcaacctccacctcccgggttccagcgattctcctgcctcagcctcccaagtagctgggactacaggcacgtgccaccacgccccactaatttttgtattttttaatagagatgggg

SEQ ID NO: 1154 - DNA, 401 bp, Homo sapiens
ggccaggctggtctcgaactcctgaccttgtgatccaccctccttggcctcccaaagtgctgggattacaggtgtgagccaccatgcctggccttcatcttctactttttttatttttaaatattttttattcactattgctgacatcactctcctacctactcggtattctttcattatgagaatctcccacatgaaaamtagtggcacctctggaactcccaaattctagtttagacagattaatccacatttatgttactatttataacagcacaactctgtaaataaatccaaatgtccatgatttattggttacatgttatgatattctgtagaatggatattattgtagccaaaaaattaatttacataggtacacagatgatgacatggtaagc

SEQ ID NO: 1155 - DNA, 401 bp, Homo sapiens
catatctttcaaatggtttggtgtcacaccacaaagcgagttattttaaagccattggaggattctagcaactgagcaaataccgctgatctagtcaatatcaattgataatgtattatatgaaggaaagtaaaatctctttcaaaactttatacatgtttcaattcagttaattatgtaataatagaaatggcactatcrtataagagggtagatgatataatttatagatcattttatcacttaaagcacctctaagtgtagaaatagaatcatagaacctcatattcaaaagcctttctgtttatctatagtggaatcgattaaatcatatttgtgtaataaatgacagtcataacaaatacagtaattaaaatacagttgttttacaaatcactgtc

SEQ ID NO: 1156 - DNA, 401 bp, Homo sapiens
tttgacagtggaaaatggattaaaaaaacacacaacaacctactaagtcttgtagtttcttccatgtggtcttttcttatctagagatagtaagtcaggcatctacaggaaaagaatccactctagtgaattcgtgcctgcctttgaactgtgaaaatcctttgcattgccccacatttctaaagacccatgaattgtgcrgtcagctagaaatatcctgtttcaaaattgagattacgtgacactgccctagaatgacacttgagctgaatgctcttgtccactgctgtagggtacacatgaaaccttttacttagaaatttaaggttcttcatgtggctggaaaaatgccacaacatgacttttatcaggctaaaatttactgtgtcatgaygaaaatt

SEQ ID NO: 1157 - DNA, 401 bp, Homo sapiens
attgtgcrgtcagctagaaatatcctgtttcaaaattgagattacgtgacactgccctagaatgacacttgagctgaatgctcttgtccactgctgtagggtacacatgaaaccttttacttagaaatttaaggttcttcatgtggctggaaaaatgccacaacatgacttttatcaggctaaaatttactgtgtcatgaygaaaattgaataaagtaatcttgactcattttaatttatttcacctatgtctgactccagctttatcctaatatacaggacaaaagttatttccataggagcatctattatttgcctctatttctaaccctgtacaggtatgttagaaacactgaacataattttatatatgtctttgtctcatcaatacagtgcagttt

SEQ ID NO: 1158 - DNA, 401 bp, Homo sapiens
tcatgtaagaaagcataactgaagctcattagtcaaactaaaaagctcatgaaatttctcacctgaatctttcctcaccctgggcagagacttcctttcaatttgtgctcaattttaggcaacatttaaggatctgaataggcaaagagtgagagcaatgattgtaaatgtgttgttttaaaaggtttctccactaaattsgtatatgacaactgaaaaaaaccttgggacaatgtcattcagaccacaggaaagtgcttgaatatgttctctgatgctctttttagagcagctgatataaaaagcaaagaattttatgtccaaaagacttaggcaaaatatccgaacggaatgctgaatgcatggcttttcaatttatcacagtttatagacactttaca

SEQ ID NO: 1159 - DNA, 401 bp, Homo sapiens
ctcatggtactgaattggacactgtacaaattcatggtgttattcatattactggccataaaaagagcaagatcacatttatatatgttctggtgaaaattactctccagtgtttctgctgtcacctacccaaaccaagctgtatatttttttcttgagaattttgcatccatactgtttcttgtttggtttgcactgacraagaacattcttcctccacagcacagatctagttatttgcaaaagatatttttaaaattataagcaaatgttgatttagactccttacacattaattaagagaagcacttttgtggatgttctttggcttagttcaagactttgtcaatctgacttttcattaagactttatttattattttccccaaaaagtacttgtt

SEQ ID NO: 1160 - DNA, 401 bp, Homo sapiens
tttattattttccccaaaaagtacttgttgctcagatttgaataagagtagtttacttgtctacagataaaaacaccttggctgtattcaaagagtaaaatatttaattcaaattttaggctatctgaattttatcctttctgcttagaaatgataaacaaatatttattcttttattgagcaacagctatattccagaaytgttttaaatgcttgagattggggaatagagataagtgatactagcttggtatgcacgtatatgggtgaccagggggattgttaggaagaggaagaaagagaactattacaaacacgcatttataaggcagcttttaatcatcaataaaatatggtaaaatatgttagtttattaattatttgattaaacacatactttt

SEQ ID NO: 1161 - DNA, 401 bp, Homo sapiens
ctagccattctcaattcaaatgaccacaaattgagagaatcaggaacacttagatacttagccaacacttttcactaacttatttaggatatatgcctgagatcatgacaataataataatcatggtaaaagtagcaattattgttattttaatagtcataacagatgagtgttgccatggaggtcagtatcacaacacarccaagtccatctgcctcattttgatgttttagtggccacctaactgataccgtctggtgacactcaggtcagtgactcccgctttttctaagggatggcctcagtggtttggggaaggtgccaaggaaagctaactggggacttgctcctgataagtcagtgatcatggaccacaacaggtggccatgaccccagggggg

SEQ ID NO: 1162 - DNA, 401 bp, Homo sapiens
tttgggaagctgagcggggtggatcacttgagctcaggagtttgagaccagcctgagcaacatggggagatcctgtctctacaaaatatacaaaaaattagccaggcatggtggcacattcctgtagtcccagctacttgggaggctgagataggagaatcacttgaacctgggagacgaggttgcactgagctgagatcrtgccactgcactccagcctgggtgacagagccagaccctgtctcaaaaaaaaagaaaaaaattattcaatcatttatattttctggaattttttctaaaatttctcccagatactttaaaaatactcctgcaaacaatttccacttgcctagcaggccattcagaccacagaactaaaagcaaaatttatcagcctttcc

SEQ ID NO: 1163 - DNA, 401 bp, Homo sapiens
ttttctaaaatttctcccagatactttaaaaatactcctgcaaacaatttccacttgcctagcaggccattcagaccacagaactaaaagcaaaatttatcagcctttccttccaatttgccatacccccacaaatcgcacttataaagtcaagagtaagcacatttctaacaaggaccaaaacttttttctcaccaatgrcactttcctatatcaagtgtacctaatcaggcctatcattaagaaacacaacctttgctgtcctctgctatatcacatcatcttttcaattcagattctatttacaaaaatcctctaaactcattggtttttctacaatggtttttgatcacattatrttactgacaaatgctatttttatctcctatatgggtgaatca

SEQ ID NO: 1164 - DNA, 401 bp, Homo sapiens
agcacatttctaacaaggaccaaaacttttttctcaccaatgrcactttcctatatcaagtgtacctaatcaggcctatcattaagaaacacaacctttgctgtcctctgctatatcacatcatcttttcaattcagattctatttacaaaaatcctctaaactcattggtttttctacaatggtttttgatcacattatrttactgacaaatgctatttttatctcctatatgggtgaatcatgcatattaactctttcctgggatgatggacataaaaaatctcctttagagatttaattacatttaaattattttcaagtcaagtagagtataaattcacattttacaacagcccatcatagaagtctcactggatttgttttctttccgctaatgtc

SEQ ID NO: 1165 - DNA, 401 bp, Homo sapiens
aaactgataccaaggggtacctgggatgctgaatgttcagtgctaaaaccaggaaagtccaggcaagtgctgagtggatcaggctacatagattactgcacaattaattatagtaaattgattctgtatgcaacttaaataaacccagtttattgaggcatgatccagtttgcccgtgtgagaacctgatttctgtgaacrtggagatttagccataggtggctgaaggagagacataatatagatgatgatgttaatgatagcaatggtaaccatttattgatgacaggactggacttttttaagacttagccaaagataacattctctgaaatctttcttgatatccttaccctacccagaattttctgattcttcctttttactcccaatgtaacctg

SEQ ID NO: 1166 - DNA, 401 bp, Homo sapiens
tatagatgatgatgttaatgatagcaatggtaaccatttattgatgacaggactggacttttttaagacttagccaaagataacattctctgaaatctttcttgatatccttaccctacccagaattttctgattcttcctttttactcccaatgtaacctgtgccgaagtttattataatgcccttaaacttccttattwgtttatttgtcttcctctgctagaatataagcttctttaggaggatagaggcattatgttatttatctttgtaccccaagcatccagtatatttagtgaatgaatgaatgacctaggtatttttttttactcttcaaagtaatacaataaaatacatgataccatcctgttttactgatgagaaacaagtatctaagatg

SEQ ID NO: 1167 - DNA, 401 bp, Homo sapiens
ccaaacatagtgacttggaggaccctctcctttcagtaagagagtaggaatcagatatacaaatgaagactatgtcagtcttattatggatactgatgaaagttttctggtaatctgcaaaatagattttatagataattgctgtggaaaagaagtgactaaatgtaaaatataatctctgctggtatgtttagaccaggmaatcaaaatgcatgacctagtcagacaaagcaaaaggttctttacgtgttcttcttgtatcatcagtgagcctttttcatttaagtacaatgaagtgtctctgccttaagaaattcttcagaggcagaaattcattattctttattaactcactgtgcccttctccttcttctgcaccttttcctgtgtattgtctccca

SEQ ID NO: 1168 - DNA, 401 bp, Homo sapiens
tctgccttaagaaattcttcagaggcagaaattcattattctttattaactcactgtgcccttctccttcttctgcaccttttcctgtgtattgtctcccattttaaaatgtattaactgagaactaaagatagcaaagtgttgtcaatattataaagtatagtaagacagcatagaactacatggagaatatattgatamcagcatcttttacacagtgatgaattaataattaaaccaaacaaaaccaaacaacaaaacagttttacagctacttgggaaatatctgtaaacaaagtttcmtaataattaactcttggaatatcgtcacttgtacaaatgctgcaattctagcaagtttgggacacttacaggaaactgtctgcaaataaacatgtata

SEQ ID NO: 1169 - DNA, 401 bp, Homo sapiens
tttaaaatgtattaactgagaactaaagatagcaaagtgttgtcaatattataaagtatagtaagacagcatagaactacatggagaatatattgatamcagcatcttttacacagtgatgaattaataattaaaccaaacaaaaccaaacaacaaaacagttttacagctacttgggaaatatctgtaaacaaagtttcmtaataattaactcttggaatatcgtcacttgtacaaatgctgcaattctagcaagtttgggacacttacaggaaactgtctgcaaataaacatgtataatgattttagtgtatatgacatgaaacagacggcgacccatttattaaggtccattacacagatataggagggactttaaaggcatcacaaaatacttgcca

SEQ ID NO: 1170 - DNA, 401 bp, Homo sapiens
ccaacagagtcaattttcatgtttatttattctttgctttagaatgttatgtcagttgacagtattcagggcttgtgttgatgtaaattgccataaagcaaggaaacacgggctatagtactgtcagggaggctcagcactgcagaacaacacaatttaagaaaagcatttgcagaaagattcagtgtcagtcttcggaarttgactgtagatgcaaattggcatcaactacttcacaatctccctctaacaaaagagatggaaagggtggaatcaccaaacagagtgcacttttcggcatagtagctttcatgaagacaaaaataggatcccatttgttcattcacaatggatattcagactccacattctgccacccccatgttttattggagcctgca

SEQ ID NO: 1171 - DNA, 401 bp, Homo sapiens
ataggaaaaatgatttgactagagagtcaatatgcctgaattcatatctcagctctgccaccatcactggtttaattacatttggggagtcacagcgtggtggggcctcaatttattcttttggagggacttagtctaaatcagtgattgtcaactagaatgaaagtgagggaactcctcccttggagacttgtcagaatyttggaggagacgttttgcagacaaagcccaactmttttccytccacactcctacctccaccaccatcacaagcaaattctgatgtttgttcctagacttctaagattttgactccctcatcttccattgaggattgcttatggaaacaacgtaatagattcctagcaaatcttcatgtatagtgtgtcagcaactagtct

SEQ ID NO: 1172 - DNA, 401 bp, Homo sapiens
cctgaattcatatctcagctctgccaccatcactggtttaattacatttggggagtcacagcgtggtggggcctcaatttattcttttggagggacttagtctaaatcagtgattgtcaactagaatgaaagtgagggaactcctcccttggagacttgtcagaatyttggaggagacgttttgcagacaaagcccaactmttttccytccacactcctacctccaccaccatcacaagcaaattctgatgtttgttcctagacttctaagattttgactccctcatcttccattgaggattgcttatggaaacaacgtaatagattcctagcaaatcttcatgtatagtgtgtcagcaactagtctcaagtgtctaacgttcttttcaactttaaaataa

SEQ ID NO: 1173 - DNA, 401 bp, Homo sapiens
tcatatctcagctctgccaccatcactggtttaattacatttggggagtcacagcgtggtggggcctcaatttattcttttggagggacttagtctaaatcagtgattgtcaactagaatgaaagtgagggaactcctcccttggagacttgtcagaatyttggaggagacgttttgcagacaaagcccaactmttttccytccacactcctacctccaccaccatcacaagcaaattctgatgtttgttcctagacttctaagattttgactccctcatcttccattgaggattgcttatggaaacaacgtaatagattcctagcaaatcttcatgtatagtgtgtcagcaactagtctcaagtgtctaacgttcttttcaactttaaaataataataag

SEQ ID NO: 1174 - DNA, 401 bp, Homo sapiens
atttaaatctggatagctcccttttaaatccagccctctgattctataaggcaaatgacaaggctgtctagacatggagtacattgagcaaggtttagatgagggagccccggagactgtgagacagacctgttctgtgcctgagaatgtcagtgatgactcacaggaggtggagaaaagtgtgctcaatgtatgggccasgctcagggagctccttgaagacagatcatttggtattaatgatacagcgataccacaaagcacaggaggtgtagcctgctagcattgaagttaggaactgatttgaattaacccagtgtttgaatctggatgcaagagcctgtatggtatcttgcatgctaacttcttcataatcttgttcctgaatgggtgccagattg

SEQ ID NO: 1175 - DNA, 401 bp, Homo sapiens
cctactagctgattcacatcgttttcataaccaaaatatagctcatggcttgagtatgaaaccctgaccaaagtatggaatttcacatacatgtcatgataatgtcctagtcagattcagtcctacctcttgcttctgaaaatgtgctagcttctgttctaatcctaattgcatgaattagttcattgtccagtttagaaragaggaacgagtaggaagctgctttggttctggggtcaatctaggacttcaggtctattttagggaaagcattctagaatgtccttgcccttcctgatacactttgatataccttcaactttgagatcattgacttagtgttatcttgaatgagggggtccaatasagccagctactccatgctgatttagatctcaatg

SEQ ID NO: 1176 - DNA, 401 bp, Homo sapiens
aattgcatgaattagttcattgtccagtttagaaragaggaacgagtaggaagctgctttggttctggggtcaatctaggacttcaggtctattttagggaaagcattctagaatgtccttgcccttcctgatacactttgatataccttcaactttgagatcattgacttagtgttatcttgaatgagggggtccaatasagccagctactccatgctgatttagatctcaatgcttttgaaattcaagtttttaaagcacttgactctctgttttctccaaatgaaatcctattttgtatttaaaacagtaagaccagatttccccttttgaagtaattataggatcccaagaacccttaattccactggtcccatggtctacttatccccccgccccc

SEQ ID NO: 1177 - DNA, 401 bp, Homo sapiens
taggaaaatgtctgctgtgctccagccagagcagacctactgtattgcaaatttatcgtggctggaccatcctccagagatgtatgccataaggacaatggaggcctcagctaagtacctcctgctgcattcattcccagggtagtaggtggtatagctgcaagacacggaacccagtattaggccttgctccattttctytaggcttcaaagctctgagccagtgatagtttataaaagcccaggactccaaagaattaaaatcagcacctgtagatctcctggtgaagataaactccatgggcatgtaaagaaagcaataaagatacacacatagtttttttttttcttttgaatatcaacagtaaccttgagcagagtgactctttatcagggctctt

SEQ ID NO: 1178 - DNA, 401 bp, Homo sapiens
ttctctgtcaggggtcctgccacctgacatgtgcaggtccagttaggtagttgaaaaggacacattactacacttatcagggttctcactacaaacaaattttcatagtccttctggaaataagccacatcaccgaatgcctttccggtagctgacatgattgattgtggacaacgaagaagtcacttattcctaaggaaragactggagtgagggttgctgtttgcacatacataaaatcctagaagagataccaaagctacattatgcagaaagattattattttagccagtggctctgaggacaacctcatttgtcttctctatgggtcactctttttttttttttttttcttttgagacagagtctcgctctgtcacccaggctggagtgcagtggc

SEQ ID NO: 1179 - DNA, 401 bp, Homo sapiens
tgggttcacgccattctcctgcgtcagcctcccaagtagctgggactacaggtgcctgccaccacactggctaattttttctatttttagtacagatgaggtttcacatgttagccaggatggtcttgatctcctgaccttgtgatccgcccacctcggcctcccaaagtgctgggattacaggcgtgagccaccacaccyggccaggtcactcattttttaagtgaatattttcatttccaaaaaaaaaaaaaaaagcctcatgtttccaaagtggcataaaaggccctggcatgtagagtgtagaacagaggctcctcctttttagccagtctctatttcagaaatcattagatagaacatacttggtctgaaaaaaaactatgaaattttgatccccc

SEQ ID NO: 1180 - DNA, 401 bp, Homo sapiens
cttcatgacccatcatggtgctcgatcagttccttgttttttcttttgagcatgactaataataataaagtctgagctctggtctcatatcacatattttaattgtataaaacaactatgaagacccacactgacaagatcctgagcctaaataaaattaggtcatgtctaaaagatattgtcctttgaattaagcagaaygtgtgggtgtgtgcacatgtgtgagagagagggagagtttgctcacacacagccttgacactgataatattttcccagacagcttctactcagtgactttgtagtaaaatcaaaggagctttagtgtgtactcattttacagattagaatagtagagcccagagagagtaagttatttgcctgaaatcccacagcgaggg

SEQ ID NO: 1181 - DNA, 401 bp, Homo sapiens
attttagcacactgatcaatcttgagatactaaaatataccagcaaagttgtgaactcgaaaattactaaacaggctgggcatggtggctcatgcctgtaatctcagcactttgggaggtcgaggaatgagattgcttgagcccaggagtttgagatcatcctaggcaacaagaacaacaacaaaaaacaattagttgggsatggtggcgcatatctgtaatcccagctactgaggaggctgaggcagaagaatcgcttgkacctgggagttcaaggctgcagtgagctatgatggtgccactgcactccagcatgggtgacagagtgagaccctctctcagaaaaaagaaggaaagaaagagagagagggtgagagagagagagaggaaggaaggaagga

SEQ ID NO: 1182 - DNA, 401 bp, Homo sapiens
aaattactaaacaggctgggcatggtggctcatgcctgtaatctcagcactttgggaggtcgaggaatgagattgcttgagcccaggagtttgagatcatcctaggcaacaagaacaacaacaaaaaacaattagttgggsatggtggcgcatatctgtaatcccagctactgaggaggctgaggcagaagaatcgcttgkacctgggagttcaaggctgcagtgagctatgatggtgccactgcactccagcatgggtgacagagtgagaccctctctcagaaaaaagaaggaaagaaagagagagagggtgagagagagagagaggaaggaaggaaggagaaaagaaaagaaaagaaaaaaagaaaaagactgaacaaaacttgagaaaagcaatgtac

SEQ ID NO: 1183 - DNA, 401 bp, Homo sapiens
gtctgctcttcccctcttcacccccagccccaggtggaaatgaagatggttttccattttgttttgaagagagagcttcatgtcactgatctataatgtgaaggaaaatatcttcatcaaaaccaacattcttaggaatacatagaaaataaaaagactactcatgtcttagaaaagttttcccaaaagttggatcatgtkggataatgttatgatccttttcactttcaaagttccctagttcccttagagaggggaaaattatattactggtagaaatcaacatttccttttctttagtgaaaaaaataacacagcactctttaattgaaacctgtgtatctttgccctccccactttctgcctttgctttttcattcacatttaactcctgcagcaac

SEQ ID NO: 1184 - DNA, 401 bp, Homo sapiens
ctgcagcaacaataacctctgggctgttctgcattagagagaactcaagagccctggaaattataatttcagaagtattgataatattaaacaacatcaaaaatttttaccacttttgcctgcccttcttacttttttcacaagttaattgaagatggaaggcagtaaagcctcgtgattctttttcaaaaaggttaaaawacaatataatcyatcttttttttttttttttttttttgacacagagtcgtgctcttgttgcccaggctggagtgcaatggcgcaatcttgactcaytacaacctccgcctcccaggctcaagcaattctcctgcctcagcctccaagtagctgggattacaggcgtgcgccaccgcacccagctaagttttgtgttttta

SEQ ID NO: 1185 - DNA, 401 bp, Homo sapiens
taacctctgggctgttctgcattagagagaactcaagagccctggaaattataatttcagaagtattgataatattaaacaacatcaaaaatttttaccacttttgcctgcccttcttacttttttcacaagttaattgaagatggaaggcagtaaagcctcgtgattctttttcaaaaaggttaaaawacaatataatcyatcttttttttttttttttttttttgacacagagtcgtgctcttgttgcccaggctggagtgcaatggcgcaatcttgactcaytacaacctccgcctcccaggctcaagcaattctcctgcctcagcctccaagtagctgggattacaggcgtgcgccaccgcacccagctaagttttgtgtttttagtagagacgggg

SEQ ID NO: 1186 - DNA, 401 bp, Homo sapiens
tcaaaaatttttaccacttttgcctgcccttcttacttttttcacaagttaattgaagatggaaggcagtaaagcctcgtgattctttttcaaaaaggttaaaawacaatataatcyatcttttttttttttttttttttttgacacagagtcgtgctcttgttgcccaggctggagtgcaatggcgcaatcttgactcaytacaacctccgcctcccaggctcaagcaattctcctgcctcagcctccaagtagctgggattacaggcgtgcgccaccgcacccagctaagttttgtgtttttagtagagacggggttttaccctgttgccaaggctgatctcaaaactyttgacatcaggtgatccacccacctcgacttcccaaagtgctgggattac

SEQ ID NO: 1187 - DNA, 401 bp, Homo sapiens
gtcgtgctcttgttgcccaggctggagtgcaatggcgcaatcttgactcaytacaacctccgcctcccaggctcaagcaattctcctgcctcagcctccaagtagctgggattacaggcgtgcgccaccgcacccagctaagttttgtgtttttagtagagacggggttttaccctgttgccaaggctgatctcaaaactyttgacatcaggtgatccacccacctcgacttcccaaagtgctgggattacaggcgtgagccaccgcgcctggccaaagtaatctatctttaaagatggtctgctatccttaattgtgtatttggtataggttaatagagtgaaagtcctgtaagctataggattagatggacgttgcctgcaattcaattccatctgtag

SEQ ID NO: 1188 - DNA, 401 bp, Homo sapiens
cgtgggctagtcacctctatgagctttgtcatggctataattttcatcaccagtcagtccttcaaatagatatttcttagagatgcatgggtaattagagaaactctcaattcagttattaaatttttcctactcatatccagagttaactgctcatttttagcttgaacaaattagaggattgcttagtgctgaatactwgtctctttgttctataagcttgacagagctttcttattgcctatatgataatgttggaccatcttcaagtgtctacagtctttcctggggctggtatggtgctccagcataaatgcataaatgtgtaatgcagtggaatttcaactcagtgataaaattctctaaaagagagaactaattaattttagagccagaaagag

SEQ ID NO: 1189 - DNA, 401 bp, Homo sapiens
tatatgataatgttggaccatcttcaagtgtctacagtctttcctggggctggtatggtgctccagcataaatgcataaatgtgtaatgcagtggaatttcaactcagtgataaaattctctaaaagagagaactaattaattttagagccagaaagaggcctatatccaacctatttatgtatgtgctagagctggttastacagagcaaattagagaccaataaaaagacatggtgatcacttcaaattgaactgtcttaacagaaataaattgcagaagcagataagattttcacaaatcagtgcagtatggccctgttactttttatagcatctggattatggcttagacttattaagaattagaaaaacaaatttcagtgccatcactgatacctc

SEQ ID NO: 1190 - DNA, 401 bp, Homo sapiens
ggaggccaaggcaggcagatcacgaggtcaagagatcgtgaccatcctggccaacatggtgaaatctcatctctactaaaaatacaaaaattagctgagcatggtggcacatgcctgtagtcccagctactcgggaggctgaggcaggagaatcacttgaacccaggaggcagaggttgcagtgagccgagattgcaccamtgccctccagcctgatgacagcgagactccatctcaaaaaaaaaaaaaatatatgaaaaggtaacagcaattttcagtgagtaagcatataagtaaaggataaggagagaattgcctcttttctgtcgcattcaaggaacagctggaaaatggaagaaacatagaaggagagaaacatcaagaaatacgtattagtcatt

SEQ ID NO: 1191 - DNA, 401 bp, Homo sapiens
ttgtgtgaaccatctttgaacttagtcaaatgcagatgtaattttatattaagactttaaaagaatggaaaaatggcttcaaacataggagaacaaaattttctgctttctttgtttacttcttattttatgtcaccccataaatgtgattggtacggcttttgagattattggtttagaatttcttaccctttgttgtcytgagccatcttttctctagaaacatgctaatattacagatggttcaaatgttcctataatgtcaatgtgtaaatccatattgagcaatgtagaggtccggctgtgaataggacaaagaaaaaattaagaaaatatttaaatgtacatacctccttttctaggatttaataactcgaattatttataaaatgttattgaca

SEQ ID NO: 1192 - DNA, 401 bp, Homo sapiens
tattcaagttattttttaagcagatgttctgattaaaactctgtatctgtctttggtgctttagctagcaaaaaaataatgaatataaaacaattgcctccccatatatattggtatatataatttattagaatgtttttcttttcacttttaatgaaataataatgaaatttcaatatgtataactggtgaaataatttyggcaatactgtgagtgaaatgatagggcaaaaatgaatgcttttatttaactcacaattgatataaacaaaaaaatcaaatgatccagtcaggtcgagggtaaattctcttaaggaaataacaggtaaatacttttccttgagtgtaaagacacttatgtgtatttattaacacatacatagaatttagataagaattat

SEQ ID NO: 1193 - DNA, 401 bp, Homo sapiens
caagatcatgagatcacaaatgtgacttttccttaagatttcatcacaagataaatcaaagtgctaggaattgtattttcccttttcctagtaatcaagtatccttctcagatgactctttttgtaaaagtaacaacttctcatctttgagacttgactcacataccaaatatcaaaaatggaaaatctttgaattctttktcctgttgtgggaatacgagtcatttataacaacaaaaaaaatcgataggaaatggatgttttagggaagtgtatcctgagtgctgtctttaaggcattgattggagactgcccacatctaaaaaatgactctaggacatcactctcatgtatttccgtgaaaaagctggtggaaaaatgtgttttcttctaaaaggcta

SEQ ID NO: 1194 - DNA, 401 bp, Homo sapiens
tctaaaaaatgactctaggacatcactctcatgtatttccgtgaaaaagctggtggaaaaatgtgttttcttctaaaaggctatgtgtgggacgtgtgtcagtgttcacatgtgcctaataggcatacgtaaaatcacacttgtatgaaaatcaagtaaatctgctgaaataaacagcaacccatgtttggggcatttgtrttggtagagattggcttttaaaggagaatggattaatatatgattctcttgtcggtattactatgaattgttcttttttgaggaggagtctcgccttgtggcccaggctggagtgcagtggtgcagtcttggctaactaccacctcctcctcctgggttcaagcgattctcctgcctcagcctgctgwgtagctgggatt

SEQ ID NO: 1195 - DNA, 401 bp, Homo sapiens
tggggcatttgtrttggtagagattggcttttaaaggagaatggattaatatatgattctcttgtcggtattactatgaattgttcttttttgaggaggagtctcgccttgtggcccaggctggagtgcagtggtgcagtcttggctaactaccacctcctcctcctgggttcaagcgattctcctgcctcagcctgctgwgtagctgggattacaggcacatacaatccacacccggttaacttttgtatttttagtagagaagggtttcgctctgttggccaggctggtctctaattcctgacctgatctgccttcctcggcctcccaaagtgctgggattacaggtgtgagccaccatgccaggcctgaattttcacttgcaaaattatcagtcagtt

SEQ ID NO: 1196 - DNA, 401 bp, Homo sapiens
acagggtggcatttaattatatttgtttacagaaatatttttatatttgaatttctttcataacagtgtttattgtggtcaaaggatgggagggatgaggaaataatatttgaagaccacaggggcattcctcacctctgtagtcttattatctggccttgaaacactacgacattctttaactgaatttattaggggctraataccaacaacataagtcagaaaagggtttacattgacccctttggattctaaatattgtaataaatattattagttccgaaatatcatatctgtttgatttcccaaatgattgcagaaawgcttygatctttttagtcctatratattgtagagatatctcactaaygatgttttttttttttttktaagatrgagtc

SEQ ID NO: 1197 - DNA, 401 bp, Homo sapiens
gggcattcctcacctctgtagtcttattatctggccttgaaacactacgacattctttaactgaatttattaggggctraataccaacaacataagtcagaaaagggtttacattgacccctttggattctaaatattgtaataaatattattagttccgaaatatcatatctgtttgatttcccaaatgattgcagaaawgcttygatctttttagtcctatratattgtagagatatctcactaaygatgttttttttttttttktaagatrgagtctcgctgtgtcgctcaggctrgagtgcartgagccatgtttrtgccactgcactgtagcctgggtgacagagcgagaccctgtctacaaaaaaaaaagaaaagaaaagaaaagaaaaaaagaa

SEQ ID NO: 1198 - DNA, 401 bp, Homo sapiens
ttcctcacctctgtagtcttattatctggccttgaaacactacgacattctttaactgaatttattaggggctraataccaacaacataagtcagaaaagggtttacattgacccctttggattctaaatattgtaataaatattattagttccgaaatatcatatctgtttgatttcccaaatgattgcagaaawgcttygatctttttagtcctatratattgtagagatatctcactaaygatgttttttttttttttktaagatrgagtctcgctgtgtcgctcaggctrgagtgcartgagccatgtttrtgccactgcactgtagcctgggtgacagagcgagaccctgtctacaaaaaaaaaagaaaagaaaagaaaagaaaaaaagaaatgta

SEQ ID NO: 1199 - DNA, 401 bp, Homo sapiens
ttattatctggccttgaaacactacgacattctttaactgaatttattaggggctraataccaacaacataagtcagaaaagggtttacattgacccctttggattctaaatattgtaataaatattattagttccgaaatatcatatctgtttgatttcccaaatgattgcagaaawgcttygatctttttagtcctatratattgtagagatatctcactaaygatgttttttttttttttktaagatrgagtctcgctgtgtcgctcaggctrgagtgcartgagccatgtttrtgccactgcactgtagcctgggtgacagagcgagaccctgtctacaaaaaaaaaagaaaagaaaagaaaagaaaaaaagaaatgtaattcactttcttctggtc

SEQ ID NO: 1200 - DNA, 401 bp, Homo sapiens
cgacattctttaactgaatttattaggggctraataccaacaacataagtcagaaaagggtttacattgacccctttggattctaaatattgtaataaatattattagttccgaaatatcatatctgtttgatttcccaaatgattgcagaaawgcttygatctttttagtcctatratattgtagagatatctcactaaygatgttttttttttttttktaagatrgagtctcgctgtgtcgctcaggctrgagtgcartgagccatgtttrtgccactgcactgtagcctgggtgacagagcgagaccctgtctacaaaaaaaaaagaaaagaaaagaaaagaaaaaaagaaatgtaattcactttcttctggtcagcagctgacaggatagaacacat

SEQ ID NO: 1201 - DNA, 401 bp, Homo sapiens
ttattaggggctraataccaacaacataagtcagaaaagggtttacattgacccctttggattctaaatattgtaataaatattattagttccgaaatatcatatctgtttgatttcccaaatgattgcagaaawgcttygatctttttagtcctatratattgtagagatatctcactaaygatgttttttttttttttktaagatrgagtctcgctgtgtcgctcaggctrgagtgcartgagccatgtttrtgccactgcactgtagcctgggtgacagagcgagaccctgtctacaaaaaaaaaagaaaagaaaagaaaagaaaaaaagaaatgtaattcactttcttctggtcagcagctgacaggatagaacacattggactagaaacctgttgt

SEQ ID NO: 1202 - DNA, 401 bp, Homo sapiens
gggctraataccaacaacataagtcagaaaagggtttacattgacccctttggattctaaatattgtaataaatattattagttccgaaatatcatatctgtttgatttcccaaatgattgcagaaawgcttygatctttttagtcctatratattgtagagatatctcactaaygatgttttttttttttttktaagatrgagtctcgctgtgtcgctcaggctrgagtgcartgagccatgtttrtgccactgcactgtagcctgggtgacagagcgagaccctgtctacaaaaaaaaaagaaaagaaaagaaaagaaaaaaagaaatgtaattcactttcttctggtcagcagctgacaggatagaacacattggactagaaacctgttgtattctta

SEQ ID NO: 1203 - DNA, 401 bp, Homo sapiens
agaaaagggtttacattgacccctttggattctaaatattgtaataaatattattagttccgaaatatcatatctgtttgatttcccaaatgattgcagaaawgcttygatctttttagtcctatratattgtagagatatctcactaaygatgttttttttttttttktaagatrgagtctcgctgtgtcgctcaggctrgagtgcartgagccatgtttrtgccactgcactgtagcctgggtgacagagcgagaccctgtctacaaaaaaaaaagaaaagaaaagaaaagaaaaaaagaaatgtaattcactttcttctggtcagcagctgacaggatagaacacattggactagaaacctgttgtattcttacttttacccatgacatggcttcttt

SEQ ID NO: 1204 - DNA, 401 bp, Homo sapiens
gtttacattgacccctttggattctaaatattgtaataaatattattagttccgaaatatcatatctgtttgatttcccaaatgattgcagaaawgcttygatctttttagtcctatratattgtagagatatctcactaaygatgttttttttttttttktaagatrgagtctcgctgtgtcgctcaggctrgagtgcartgagccatgtttrtgccactgcactgtagcctgggtgacagagcgagaccctgtctacaaaaaaaaaagaaaagaaaagaaaagaaaaaaagaaatgtaattcactttcttctggtcagcagctgacaggatagaacacattggactagaaacctgttgtattcttacttttacccatgacatggcttcttttagaatac

SEQ ID NO: 1205 - DNA, 401 bp, Homo sapiens
cctttggattctaaatattgtaataaatattattagttccgaaatatcatatctgtttgatttcccaaatgattgcagaaawgcttygatctttttagtcctatratattgtagagatatctcactaaygatgttttttttttttttktaagatrgagtctcgctgtgtcgctcaggctrgagtgcartgagccatgtttrtgccactgcactgtagcctgggtgacagagcgagaccctgtctacaaaaaaaaaagaaaagaaaagaaaagaaaaaaagaaatgtaattcactttcttctggtcagcagctgacaggatagaacacattggactagaaacctgttgtattcttacttttacccatgacatggcttcttttagaatacaaactgtttagaa

SEQ ID NO: 1206 - DNA, 401 bp, Homo sapiens
cagagttgtagcccttcagtaacaaagaatgagtcagaggaaatgagttaatttaacaaattgctagttgcctaccagatatcatagcaaggaatgatatatgcaaggtgtgttaaaggcaatgtttccttaatttcttctttctatctcccatctcccaatgtcctctggggaggccgtagaggtgggagggacatattwagtaaaaagtgtgaccacttgctgagtaatttttagtgatttgttgagctggattaagtgaatttagagttgaatcttcaaaatgatcatttcctttttttaagagtttatattctggatattttcatttgaagagcagtgatagtatccggctaaggtttactaaattgttcaagtgagtttgcagaagactaagtgaa

SEQ ID NO: 1207 - DNA, 401 bp, Homo sapiens
aagtattccttcttggaaaaatatcactaaaatgtaatgttcctcaagtcatagtgcaaacaaaattatatttatcatttacagacaggttttattggtcctggtgcattcatctgctgatggccaataaaagctatacaaagtctcatcaatgaaattagtaatctgtggggacaaacatgccattagtgcctgtcattygagatttgtgatcattgacgtgctttttatggcatctgaaaatattagtttgactttaaaaaatgtagagttgtttctattgttggatatatttataaaattctgaacataaaaatgctctttggtagccacttgaatttttaaaactatatttaataaaatacagcttttaggaatagcaatcagcatgggataggtga

SEQ ID NO: 1208 - DNA, 401 bp, Homo sapiens
aaactatatttaataaaatacagcttttaggaatagcaatcagcatgggataggtgacaatgaattttttttttttttttttgagacggagtctcgctgtgtcgcccaggctggagtgcagtggcgagatctcgctcactgcaagctccacctcccgggttcacacctttctcctgcctcagcctcccgaatagctgggamtacaggctccagccaccacacccgggtaattttttgtatttttagtagagatggggtttcaccatgttagccaggatggtcttgatctcctgaccttgtgatctgcccgcctcggcctcccaaagtgctgagattacaggcgtgagccaccgcgcccggccaagtgacaatgtattttaagtagcctctgctatccttga

SEQ ID NO: 1209 - DNA, 401 bp, Homo sapiens
actgtcgtggagaagccccttttggatgaagctttacggaggattttcaaatgttaattatatttacaaacagatcagatgtaggcatagatatattagaatactttatatcttctctcatttatttttctactgctagataaatgggacttataagtagctgagtaggcaaacaagaaagaatgcatacagttttatcartttatctgagattttgtgataagctacagaccaagtcaaatggactagttttggcaggggcttgctgtccatatgatggtcagttagcttttttctgagttaaacttgaaaactaagaactttaagaagtgcatgggtatatataggtgtgtgtgtgtgtgtgtgtttgtgtgtmattttacaagactgtagaattataa

SEQ ID NO: 1210 - DNA, 401 bp, Homo sapiens
agaaagaatgcatacagttttatcartttatctgagattttgtgataagctacagaccaagtcaaatggactagttttggcaggggcttgctgtccatatgatggtcagttagcttttttctgagttaaacttgaaaactaagaactttaagaagtgcatgggtatatataggtgtgtgtgtgtgtgtgtgtttgtgtgtmattttacaagactgtagaattataaaatgacatttgttttaaggaatatttgattgacagtttcacttaccaacgttagcctctaattatgacactgaggatacccaaatttaaaaatttcctttataatggtccctgagacctggtgattgaggtcataaaaaaggaatggtagttttctttcagaattttaaattttc

SEQ ID NO: 1211 - DNA, 401 bp, Homo sapiens
cctctaattatgacactgaggatacccaaatttaaaaatttcctttataatggtccctgagacctggtgattgaggtcataaaaaaggaatggtagttttctttcagaattttaaattttctcaaataatatttcaccaaatattagccacacttgtatactttgactctgttggtcgttaaaatgtatagtcataattamtcctatggaatagggatttcaatagaaagaaagctttagaaatgaatcttctttgcagataaatgctatttaattttcagagttaatataattcaaattatttagaagtttacaagattctattataaagccagtttatttatttttttaattccattatcatctgaatattctaaaaaatgtaaaaagaaatctatttg

SEQ ID NO: 1212 - DNA, 401 bp, Homo sapiens
gaagaaaatgtaagaatgttgactgttcactaagccgaagattccctttttgctttcaaagcttttctcaaggacattaaacactcttcctaattactttttattgatttcttgacatttctactcaacattgactgcttatttttaggaaacaaagaagcctaagtgaaaaatgttaatggtgcatttgaaactacaaarttcaatattttagtcacgcctcttatatgtaattgtaggtaaaaactatataatatttttgccatgtgcctcagctctcttatcaccgaagtaaatagaaaattctgtgattctcagatttcttccatagctttaacttattttgaacaaatctgtgacttaccttgctatatttcaaattttattttattattattcat

SEQ ID NO: 1213 - DNA, 401 bp, Homo sapiens
agctttaacttattttgaacaaatctgtgacttaccttgctatatttcaaattttattttattattattcatttttatttttatttttttgaaacagggcctcactccattgccccagctggagtacagtggcatgaactacagcctcaatttcctgggctcaaatgatcctcccacctcagcctctcaagtggctgggamtatgggcccataccaccatgcccggctaatttttaaattgttttatttgtagagatggggtctggtactactatgttgcccaggctggtctcgaactcctaggctcaagcaatcctcctgcctcagcctcccaaagtgctgggataataggtgtgagccaatgagcctggcatattttattatatatatattttttgtct

SEQ ID NO: 1214 - DNA, 401 bp, Homo sapiens
atgtccctggagataatttttttattttatgtaatttatctgcatctcttatagaaatactttttttgtcttttctccctatctctttgttgtgtacaatcagcttttaaaggatccagtggtattaattttgcattgcggtcaatcagagatcttatgcaaatattaaatattgcacaggcatcataactaaatttagcrtttcatttggaatagttccttgtgccataactccctgatggtgtttataactcagcatatttatatttgtatgtgcatttttatgtatatgcatttctctttggtctcataaaaaagtaaagtgtgtatttttttctaactctacagtcattactaaatgaaaattaagttgtttttaaggcatattttttaaaaggaaa

SEQ ID NO: 1215 - DNA, 401 bp, Homo sapiens
tacttttaacatttcacacccagtaagttggataacggatggcagagtgagcctgcgtaggtaataacttattattattacccttaccgtacatggcccttttccttgtacttttctccttgagccaataatgactttgatggttcagtctttctgcactttgtagaaaccatatcccaaacagtattttctagacatcarttctagcatgtgaaagaatctagacagcctctccgattttcatgcttctgggacagaaaagtatttatcacaggtaatgatgataatccagttaaatttgttatgcctttccttactttcaaagttaatttccatttttccattttggatgctgtgttttatggaaattgtctgtaaagagtctactagccttacatgta

SEQ ID NO: 1216 - DNA, 401 bp, Homo sapiens
ttaaataatttttaaggaacttgtctcttattgtaaattatgtctggagaattagaagtgctacacataaaaattctgtctttggaatcagtacagatccatgttaacctcgttaaaatgatgacttctcatctaacttcaaatattcatttttaccttattaagtcatagagtttagctaagcactgagggtatgtcctytttgttattttgattctgaaatcctcctgatggtttttagggtagttatggttaagattttggtgccacgcctgatatttcctaccattactgtggtagtgatggatttcttctgtctggacctccgcttctagtggttctctgatctaagcatggttggaactttgtactgacctcatactatgcctagtcacagagct

SEQ ID NO: 1217 - DNA, 401 bp, Homo sapiens
ttcctaattgagttgaacttcaaattcattgtctaaatcctaagaaatgttgaattttcacaaaccccatttcctgcctgctctctccttttctcccatacatccaccatcagatttttttttgtttactttctctctgataattcatgagtaagtttaaaaaaaaaaaaatgtgtggccagagttttctgttttctgtaratattgctgtgggtttgcccatgcctagttccaacttttaaataaatatatataataatatatttatgttataaatatataatatatttgttataaatatattatatatttatataattaaaatcttatatgtaattataacataaatatatatgatattatatacatatatatatttctttttttttgagatggaatct

SEQ ID NO: 1218 - DNA, 401 bp, Homo sapiens
tataatatatttgttataaatatattatatatttatataattaaaatcttatatgtaattataacataaatatatatgatattatatacatatatatatttctttttttttgagatggaatctcgctctgtcaccctggctggagtgcagcggtgcgatctcagctcactgcaacttctgcttctagggttcaagcaattytcctgcctcagcctccccagtagctgggattacaggcacacaccaccatgcccagctaatttttgtatttttggtagagacggggtttcaccatgttgagcaagcttgtctcaaactcctgacctcaagtgatctgccgacctcggcctcccaaagtgctgggattacaagtgtgagcccctccacccaaccgaaaagaa

SEQ ID NO: 1219 - DNA, 401 bp, Homo sapiens
gtgagcccctccacccaaccgaaaagaaatattttgatgctatgaatgcatttgtcatttctattctgtttcatccatgtgttcttcttgtttacctttgtagtagtcatttacagtgaaaataattgacaaatgacatggtgttatgttcttgaaaacaaacatacaaacaaaaacaaaaaatgaaagcagacaaatgamcaaaatggccaagtaggtgtttaaaggcttaaattgagcaaagaataaaatggtattttttaaatgttaaagaatgatgatgtgttttaatagtattgttaactattgaatcaatttatgtttagtctgcttaaaattatattttggattcaagatggactactgctatcaattgattagattgaaaacaagcaagcaag

SEQ ID NO: 1220 - DNA, 401 bp, Homo sapiens
caagtaggtgtttaaaggcttaaattgagcaaagaataaaatggtattttttaaatgttaaagaatgatgatgtgttttaatagtattgttaactattgaatcaatttatgtttagtctgcttaaaattatattttggattcaagatggactactgctatcaattgattagattgaaaacaagcaagcaagaatctagacracacaaatgggggaaaaaataatgagatgtattggacactttcctggctgtaggaaaagagctttgataaaaggagtgatgagatataattaagcacaaagtaacctacatgcttatttatcagtgaatctttcagttccagatcatttcttctacaaaaaactaaagaataaaaatcagtctttcagtcactgggtgac

SEQ ID NO: 1221 - DNA, 401 bp, Homo sapiens
gctgatttttttttaagacaggatcttgctctgttgcccaggctggagtgtagtggcacaaacatggctcactttaactttgaactcctggacctcagtttcccaagtagctgggaccacaggcacgcaccaccatgctcagctaatttttaaaattgttgtaaagacagggcctcaccatgttgcccaggctggttgaamtcctgtgctyttgccatccacccgcctcagcctctgaaagtgctgggattacacgtgtgaacaactacacccaactggattgctgaatttttataacatgtctctggtaactaagatcctttgaactatgaccattgaattcctaggacttgtgtgatctcagtagagcaatgactcacttccctcaggttttcagactt

SEQ ID NO: 1222 - DNA, 401 bp, Homo sapiens
ttttaagacaggatcttgctctgttgcccaggctggagtgtagtggcacaaacatggctcactttaactttgaactcctggacctcagtttcccaagtagctgggaccacaggcacgcaccaccatgctcagctaatttttaaaattgttgtaaagacagggcctcaccatgttgcccaggctggttgaamtcctgtgctyttgccatccacccgcctcagcctctgaaagtgctgggattacacgtgtgaacaactacacccaactggattgctgaatttttataacatgtctctggtaactaagatcctttgaactatgaccattgaattcctaggacttgtgtgatctcagtagagcaatgactcacttccctcaggttttcagacttagaggaaaat

SEQ ID NO: 1223 - DNA, 401 bp, Homo sapiens
atttttataacatgtctctggtaactaagatcctttgaactatgaccattgaattcctaggacttgtgtgatctcagtagagcaatgactcacttccctcaggttttcagacttagaggaaaatccaaggatcagtctgtagtataatgctaggcatgaaaggcatgaggaaatgatgggagcctccagacagaaaaggtmtcccactggtgactgatttctattcagagacaatgccatccctgtgattgaagctccaacacactgaaaaggtgtgaaaccaagaaaagtctctctttcaataaaagttttccatatttcaaaaattttcagaagtaaggatttcttaagggaaaagccatgaataaatcaggccctttttttttttttttgagacagag

SEQ ID NO: 1224 - DNA, 401 bp, Homo sapiens
cagagtcttgctctgtcgcccaggctggagtgcaatgatgtgatcttggctcactacagcctccgcctccctggttcaagtgattctcctgcctcagcctcctgagtagctgagtagcctcctgaggcgtgtgccaccacacccatctaatttttgtatttttagtagagatggggttttgcaatattggtcaggctggtyttgaaytccgaaccttgtgatctgcctgccttggcctcccaaagtgctgggattacaggcgtgagccatcgtgcctggcctaaaccaggcctttttaaagaataggatcagaggtctggtttcttcttcttagcaaggtcttgttttcctggtaaggccttgttttctgcttagaggcatcactacaaccagcctgtcat

SEQ ID NO: 1225 - DNA, 401 bp, Homo sapiens
cttgctctgtcgcccaggctggagtgcaatgatgtgatcttggctcactacagcctccgcctccctggttcaagtgattctcctgcctcagcctcctgagtagctgagtagcctcctgaggcgtgtgccaccacacccatctaatttttgtatttttagtagagatggggttttgcaatattggtcaggctggtyttgaaytccgaaccttgtgatctgcctgccttggcctcccaaagtgctgggattacaggcgtgagccatcgtgcctggcctaaaccaggcctttttaaagaataggatcagaggtctggtttcttcttcttagcaaggtcttgttttcctggtaaggccttgttttctgcttagaggcatcactacaaccagcctgtcatctgtga

SEQ ID NO: 1226 - DNA, 401 bp, Homo sapiens
gttttctgcttagaggcatcactacaaccagcctgtcatctgtgaactcttcccttggtgggattcagaagtgtagctcctgcatatgtctctccattatgggagtcactggattctgtggttatttaattagaacatgcctcactaggtgttggctacacctatttgagctgaactagaaatgcaaattcctgctacacrtattttgcattacaaagtgttctactttttgaaagcttttgagtaaatggcaaatctcaactgaagactttgactcttctacaggaactgcatggaaatgtgaggaaccgaattggaagaatgaacacagcctaccatttggttttcaatgctttgatttttaggtggctttgtagtaatggatggaaagaacaaagatc

SEQ ID NO: 1227 - DNA, 401 bp, Homo sapiens
tcaactgaagactttgactcttctacaggaactgcatggaaatgtgaggaaccgaattggaagaatgaacacagcctaccatttggttttcaatgctttgatttttaggtggctttgtagtaatggatggaaagaacaaagatctgtattaaacacatgcttgcagcgtctacaaaaatggtttatgttttaaaagaagcrggggaagacctcagtcattctgagttattacagctccaggagatggaagtgttttattagcccatatatatatagatagatacagtgctaccaggaaaaaactaatgaattataactaaggtcctwtgtatggaccttaatattccttgtgtctgacgatgcaggaatttagccaggcaagctgagataaggccctaacc

SEQ ID NO: 1228 - DNA, 401 bp, Homo sapiens
atggaaagaacaaagatctgtattaaacacatgcttgcagcgtctacaaaaatggtttatgttttaaaagaagcrggggaagacctcagtcattctgagttattacagctccaggagatggaagtgttttattagcccatatatatatagatagatacagtgctaccaggaaaaaactaatgaattataactaaggtcctwtgtatggaccttaatattccttgtgtctgacgatgcaggaatttagccaggcaagctgagataaggccctaacctttgctctacttttctttttatgatcttyttccacatgcccttttttggtttaaatataaccaagatgatttccattagatttttctaacaactgcatgatgtgtgtgcgtgcgtgtgtgcatgtg

SEQ ID NO: 1229 - DNA, 401 bp, Homo sapiens
tacagctccaggagatggaagtgttttattagcccatatatatatagatagatacagtgctaccaggaaaaaactaatgaattataactaaggtcctwtgtatggaccttaatattccttgtgtctgacgatgcaggaatttagccaggcaagctgagataaggccctaacctttgctctacttttctttttatgatcttyttccacatgcccttttttggtttaaatataaccaagatgatttccattagatttttctaacaactgcatgatgtgtgtgcgtgcgtgtgtgcatgtgtgtgtgtgcatgtgcgtgtgtgtgtgtgtgtgtgtgcatagcagcaaagccagatgatgatagcaggatgcagaaccccaattttttttaatattatgtaatg

SEQ ID NO: 1230 - DNA, 401 bp, Homo sapiens
tttgcttccttcccattgaacaacattaggttgaaagccaacagtagaaaaacaggtgcttgttatgtttgagtgtggagccccaaaaatggaaaaagaagaaaaagaaaaagcaccgggttttagggaaggcttctttaggcataatgtaaagttaatttatcattttggccctgttccactaaagacacagaatttgcrgcaatactacctccccatggcctatttctctgaactaaaatgtacattttctttagagaagcaagaactattatgaccagctagtcctggttttgggtggcgggggtggcaagaaaaaaaaggaaatcgttttctttaagtaaagcacttaaaattatatgtttttttgaaactggttttattcctgttcagattggtca

SEQ ID NO: 1231 - DNA, 401 bp, Homo sapiens
ttagattattagctaaaagcagatattcttagtgatacagaatatcattctagttttacaatataaagacatgttttgaaaaacctaaaatcattatatttttgcatttttaaattttaaatataaatataagcatatatttaaacaagtacatatataatatccatttaaacatgcatattaaaaacctgaaaatacaarggattgtgtaatgaatctccatgtagccatcacccacttcagccgttatcagttttgtttcatcttcatcccagtcatttcccttctctcttactattttatagcaaatcccagacatcttatcatttaatgtataaatatttcagtatgtatctctaaaagataaggactcttctatttttaaatatatccataacatg

SEQ ID NO: 1232 - DNA, 401 bp, Homo sapiens
ccctagctccctttgtctcttttttctacgtttaacttttttttaaagaaaccaggttgtttgtcctgtaaagttctctgggttttattgcatcccctcttgatgccacttaatttagtccctgttggttacatgtatgtggatgtttgattaaattcaggtttgatttttaaagataatactgaatagttttacaaaaaytgactttctaatttcatcaaaggttgattcggtatccattgaaatgaccatatgacttttatttgttgatgtgccatgatgtttttttttaaatttgttgaataagataatgaatttaccttatgatttctctcttttgacctttcagctactttcatttctaagtgggctttagttggtgaataaattaacatgtcatt

SEQ ID NO: 1233 - DNA, 401 bp, Homo sapiens
aataactgaatccttgattcttgttggatgttcagtcctctttgttttgatttgttttgcttggtacgaaagatttgactagtttggaaagtgacaggttaacattttctacattgacttgaccttcttccacccaaaatgatcctggtagaaaatgcagagtatagtaaagaatgtgtgccttccacatttagcctggtraggtctataaatatatcaaattaagccagtcagatggcctgctgatatttgctttgcaggctagacggattgtactcctttagaatctaagtattgatggaaaaagattcaagggacagcttgaaagtttgtggactccggctatggaaattttatactcatataaaactgtcagtgattagtagaaaatatgtagcaga

SEQ ID NO: 1234 - DNA, 401 bp, Homo sapiens
attttgttttatcaggagaaacacccaaaggtcacttttcattctgctgaataggaagaaatgatatcagggtctgcccagaaagcttgtaagggagaaaggaatcttacccacttaggaagcattttctaattcacttatgtgaccttgggcagccttcccctgtgcacttttgtgaattcttagctagaggtattttaytaaagactgcagaactattcttttgagatgatctgtatcctcctttaaaatataggataaactataaaatgtgctaagatccttgatagtcctatcattctatatatgtttgaacaatgccaaagcccaagttcatcagttaaaccagttaatctccattggcccttggtgtcaacttgttctttggacaaagtgtcacc

SEQ ID NO: 1235 - DNA, 401 bp, Homo sapiens
ttctatatatgtttgaacaatgccaaagcccaagttcatcagttaaaccagttaatctccattggcccttggtgtcaacttgttctttggacaaagtgtcaccttgtaggaagtctacaaacctctaagtgctcccagcgtattagctaagtcctgagctccatggagttggatgccctaattctgctttagaaagtcctrgttccattaaccgtctcctgagaattctcctggcttccctttttgtttcttgagcagagttcagtcaaggagaggtcaagagagatgatacattacttccagtcactgtattggctctgggaacctccaactctatgcaggttctttgatctcctctggccactttctttctttttcaagtacatatttgctattcagca

SEQ ID NO: 1236 - DNA, 401 bp, Homo sapiens
ctaattgcaaaggagctatattcagagcaagaataataatttcagattttttaactggacttcaaagagcaggaaagtatgcagattcctaaacacataagcattgaagatattacaggtaaggttaaaaaaaatctgtaattttgtagtgactagcagtttaatattcaaacatttaaaatgtgcatattttattaagcmaatggcgtagagttatttggtttaattttctgtaagtaactcgtaaagaattgtcctaaaagctgtgggtgaggactaattcattcaagggaaacaggatctaatgattgcyttgtgaggtatatatacactgtatactcatgctaattcctgctaattgtcaaagaagaatagtggctttttatcagcagtttgcattt

SEQ ID NO: 1237 - DNA, 401 bp, Homo sapiens
ttacaggtaaggttaaaaaaaatctgtaattttgtagtgactagcagtttaatattcaaacatttaaaatgtgcatattttattaagcmaatggcgtagagttatttggtttaattttctgtaagtaactcgtaaagaattgtcctaaaagctgtgggtgaggactaattcattcaagggaaacaggatctaatgattgcyttgtgaggtatatatacactgtatactcatgctaattcctgctaattgtcaaagaagaatagtggctttttatcagcagtttgcatttgtgtaatggtcctggtctactggttttgtctacttcactgataaggaaaacaccacttaaaacaagcaagaaaagcaagccatcctttacagtattattttctttttagcct

SEQ ID NO: 1238 - DNA, 401 bp, Homo sapiens
actgcactccagcctggcaacagagctagactccatctcaaaaaaaaaaaaaaaaaaaaaaaaaaaaaacaattgtggaaggaggtgaggaaggaaggacggaaataaggaaggagggaaagaaggaaggaaggaaagaaagaagggagggaggggcaggctgaaaggaagaaagaagaagggcatgaaggaaggagggaktccttttgtgtggtaaaggatttttggaacctctaaatgataatagtagtcccccagttctcagctatttcagagaactgtccagcttccccagcaatgatcatttgtcctgaccttttttgccaaggcaaaccaggtctagagtaaaatactacaaaatacattctctggtattaaaaaggaatggccaaaaccgtaat

SEQ ID NO: 1239 - DNA, 401 bp, Homo sapiens
cagagttcctctgcaggactgcgtggtgacagcacaccacaggtggcccattcagcactgtcatctgggacagcaaggataccctgctccatttgtcatcctatggaattctgtcagcagttgaaagcctttcagcacaaaacctttaacattcgaggcaaacttcctaattttttttttttttttttttttttttttgaracagagtttctctctgtcacccaggcttsagtgcggcagtgcaatctcggctcactgcaaccaccacctcccaggttcaagcgattctcctgcctcaacctcctgagtagttgggattacaggggcacgccaccatgcttagctaatttttgtatttttagtaragacggggtttcaccatgttggtcaggctggtcgca

SEQ ID NO: 1240 - DNA, 401 bp, Homo sapiens
cagcacaccacaggtggcccattcagcactgtcatctgggacagcaaggataccctgctccatttgtcatcctatggaattctgtcagcagttgaaagcctttcagcacaaaacctttaacattcgaggcaaacttcctaattttttttttttttttttttttttttttgaracagagtttctctctgtcacccaggcttsagtgcggcagtgcaatctcggctcactgcaaccaccacctcccaggttcaagcgattctcctgcctcaacctcctgagtagttgggattacaggggcacgccaccatgcttagctaatttttgtatttttagtaragacggggtttcaccatgttggtcaggctggtcgcaaactcctgacctcatgatcctcccatctc

SEQ ID NO: 1241 - DNA, 401 bp, Homo sapiens
tcctaattttttttttttttttttttttttttttgaracagagtttctctctgtcacccaggcttsagtgcggcagtgcaatctcggctcactgcaaccaccacctcccaggttcaagcgattctcctgcctcaacctcctgagtagttgggattacaggggcacgccaccatgcttagctaatttttgtatttttagtaragacggggtttcaccatgttggtcaggctggtcgcaaactcctgacctcatgatcctcccatctcggcctcccaaagtgctgggattacaggcgtgatccaccgtacccagcccatttcctgatatttttaaaggcaattgccgtggatgaaaatattaatacatagcacctaaataagtagttttttacatgaaaggat

SEQ ID NO: 1242 - DNA, 401 bp, Homo sapiens
cctggaaaagatgccttgaaatgtattttgaaaatagctttttgttggagtaataaaaaattagtccaattcttatttatccatagtaatgattccagaataacatgcacatccttaggaataaagttctcctttaaaaaaataaataaatagcatacatctttgaagtccccagatttccattgtcaagatttttctctyttatacatacccaaattaagagccttccctgcttgcccattaatatttgctattattcattgaatgccaatttttttttgccaattcctttatctagattatttataacctctacagaattctgtaagagtgccattacccctcttttcttaatgggaatattgagcatctgagtggttaaatgacttattcaaagccag

SEQ ID NO: 1243 - DNA, 401 bp, Homo sapiens
atttttttttttttcctaaaagagtatatagaatctgtactggcttgatatactggttttgcttttcatcctgaaaatatcattgataaacattgtgtatattagactatttttggttgggactgagtattgcccatggtgttcccaatgatatgagaagaaacatcctggtactaaatgccctggtggcctggggctgaragctttggctttgtataattcatgcacccactttcatgtaacatgaagtttgacaagtgaatattaagttcattatatgaaggtgttgcaaaccaaacttgaaacttatttctacctctcattctaaatggagatattttgtagtgctttagtctacatttacagtgatattagactctttccatttccttaaaagtatg

SEQ ID NO: 1244 - DNA, 401 bp, Homo sapiens
gacagcagtgttctttcatttgtctatagatatatctagaatagcactgtctttccaatgacctgaaggagttgatgcaccattaagaagtatccaatttaggcctgggcacagtggctcacgcctgtaatcccagcactttgggaggccgaggcgggcagatcacgaggtcaggagattgagaccatcctggctaacacygtgaaaccccgtctctactaaaaatgcaaaaaaaaattagctgggcgtggtggcacacgcctgtagtcccagctactcgggaggctgaggcaggagaatggcgtgaacctgggaggtggagcttgcagtgagccgagattgcaccactgcactccagcctgggtgacagagcgagactccgtcccaaaaaataaaaaaaa

SEQ ID NO: 1245 - DNA, 401 bp, Homo sapiens
aaaggcaccagaaatagtcaacaaagccatgtcccttttacatcacagaaatactatataaatatttaggtgccaattctaataaaatcttaattatatttataagtaaggaagtgcatcttaaaaaacatatgttttaaagacaaaaaaagcaacgatcgaaaatgccattttgtaggccatgttttgctgctctctgarctgtggtagattgggcgtgtctgtagcgtgcctgatgggacctcatggctctgaacaagcaccttccagaacttctcctttgttgcactctaaagctcttctttgaaaaaagtagatacagtgccaagacaagtgttggtggttgtatagctgattttatcaaagacagacaatttgtaaaagtaaatgtaatctgttag

SEQ ID NO: 1246 - DNA, 401 bp, Homo sapiens
tgctgacttgctgtgaatacagcacaaatatgagacatccccatatttatcatagcaaattgggatgaaccaggtttttagtttgtaaggttttctctgatcaaaatagaaaatgccagaagctgagaattgtaatctataaaatatgaggttcatttgttatatggggaaaccttgttattttttcctaatcttaagcawacagtgtaattgtattttaataaatctccttgaaaaagcatttaaattataggtccttaaattcttctcctttttaaacagtgtacccatattatctatgtctcatatttttacttcttcagaaaagcatctgagaccactatattttaattatagtaatgaaatatgatcatttttcatcatcacttagcaaagattta

SEQ ID NO: 1247 - DNA, 401 bp, Homo sapiens
aaaagcatctgagaccactatattttaattatagtaatgaaatatgatcatttttcatcatcacttagcaaagatttacaagctgagtgagtgcatatgatagtttctgcatacctctaaggaaccagggcagttcttttccacatattaatttcagctattctttagccctcccacgtccaatacaaaacatgcaatcgsgtaagtgctgttcagttttttcattttaatattgtgccaacaactgcaatttttcttcactcaacacagtttctcattaaatcttaagcctaatccagtagtaaaaacgtgctatattttaaaaatcttgaagtgaaacatttgttactcttctgataattattaaagccccaagccatcctctgagctaattgtctagt

SEQ ID NO: 1248 - DNA, 401 bp, Homo sapiens
cagttttttcattttaatattgtgccaacaactgcaatttttcttcactcaacacagtttctcattaaatcttaagcctaatccagtagtaaaaacgtgctatattttaaaaatcttgaagtgaaacatttgttactcttctgataattattaaagccccaagccatcctctgagctaattgtctagtggatcattcttgycttctagttctaagaaattacaccttttttttttttgtaattaggatcttttaggtaagttatttaaattattactggatcttatcagaaagaaaatctttgacatctatgattttgataacttccccctcctttgagatggtgactttattcacatattaaagcaagccaraaccttgagggaagaattggagagtata

SEQ ID NO: 1249 - DNA, 401 bp, Homo sapiens
gagctaattgtctagtggatcattcttgycttctagttctaagaaattacaccttttttttttttgtaattaggatcttttaggtaagttatttaaattattactggatcttatcagaaagaaaatctttgacatctatgattttgataacttccccctcctttgagatggtgactttattcacatattaaagcaagccaraaccttgagggaagaattggagagtatattttacatccaaaatacttcaaacctttctcgttacatgaaactgtttttatttttttaaatcctgtatgtaaaatatgtatagcattaaaaataatcactagtcagaatttaaacaaagacataatatactaggtcttatgataatacattgttcactagaccacttgaat

SEQ ID NO: 1250 - DNA, 401 bp, Homo sapiens
cgaatggattaaacatattaacagtgaaaaacttctctgaggagaggtttccggattgcttggacctcctcctggggactgtgtgggaatttcagtggtagttctcatcttttatattttgtttctctacagtaatttaaaatttattctgtggaaaaaatagttactattccagattataaaaagatgagaaaagaatcmttccwttttgtaccctctgatgctttatgtagtcctgtggttcaaagaaacaagacacatgaaatcaaacatgaaattgtccagatttcctcttgcatcttttctctattcttgtgtatctgttcttctgaacagtttcagtggagaactactttggaagatgttgatgtgattttttttaatctaaaaattattttata

SEQ ID NO: 1251 - DNA, 401 bp, Homo sapiens
ggattaaacatattaacagtgaaaaacttctctgaggagaggtttccggattgcttggacctcctcctggggactgtgtgggaatttcagtggtagttctcatcttttatattttgtttctctacagtaatttaaaatttattctgtggaaaaaatagttactattccagattataaaaagatgagaaaagaatcmttccwttttgtaccctctgatgctttatgtagtcctgtggttcaaagaaacaagacacatgaaatcaaacatgaaattgtccagatttcctcttgcatcttttctctattcttgtgtatctgttcttctgaacagtttcagtggagaactactttggaagatgttgatgtgattttttttaatctaaaaattattttatatcagg

SEQ ID NO: 1252 - DNA, 401 bp, Homo sapiens
cagggagtcagtgaaattaaatgagttcatttctgctaaagtacttttaactctggggaagcaaaatttatttttccttataataaaaagtaaatggtagtattacattctctcagtagacattggaaaaatatatacacctgttttaacagactgtgttatcatgtttaatttctttttttttttttttttttttttgaratggagtttcatgctcttgttgcccaggctggagtgcaatggtgcagtctcagctcactgaaacctctgcctcccaggttcaagcgattctcctgcttcagcctcccaagtagctgggattacagacatgcaccaccatgcccagctgattttttgtatttagtagcgacagggtttcaccacgttggtcaggctggcct

SEQ ID NO: 1253 - DNA, 401 bp, Homo sapiens
acaaaaaacaaactaaatttggaaagatggaaggtatctgtaaacatagacttttataattttgtataatgaatgtttatgaagccatgtagggccttattatattatacattattataagagacaggtatgaaaaacataactatgggagacaaaatcacagcaaatataatactttaagtttgatagataaaatatttrtcaaacgtatttgataatatatataatgtaaatgaaatatttatcaaattatgcctgaggtcgcaatttttttaatttttgcaatcagaccttggcaatgaccttgagcagtagggtattaaaatcttccacaggcttagcgtcccaataatggaacactaagcataaatggattaacatttgtttatagaacagctatt

SEQ ID NO: 1254 - DNA, 401 bp, Homo sapiens
taacagaatgaggttcatcttggaaaaatgcagactaatagtaacaatacctttgggaaagaataatctacaacacagatactcagccagtgagtgggcgagttctgggcagaatgctgagctggctaagaggtgagaaaagtcaatgtttgcaacacgatactgtaggaaaacagaccagcatagttggagctggcgtaracactgccacctcgagtttacacagagagagagcaaaggctttggtgtctgatactttctcaccaatattccttgatagagatttgttgatatttctatcatttaatatttgtaaacataggcatcaaataatttcaaataccacagctagtattgaggaaaagcagacagataatagggacttttcatttttcgacaag

SEQ ID NO: 1255 - DNA, 401 bp, Homo sapiens
ttctatcatttaatatttgtaaacataggcatcaaataatttcaaataccacagctagtattgaggaaaagcagacagataatagggacttttcatttttcgacaaggtattttttaaattgtccaaatatttcactgtggaatgatgactagagagagaggaaatatcagctgtatttttttttcttcctcttgttcctratcaagggagggtttgatgaaaatgaagctgagaagagaaaggatgtctaaggatggtttataaattgaccataaatgtgtggtttataaaattagccaaccctaactagaagtttcttggggtccgtgaatatctataaaaacgtctagaatctccaccaagaaaaaatggaaaataatttattcaattggaatataaa

SEQ ID NO: 1256 - DNA, 401 bp, Homo sapiens
tattatgagccaggcattgtgctaggcattagagatacaaaatgatcagaatgtgatcattgtctgacagaatgtgatcagtgtgtcacagatcatcacaatacagataagtgcagtgaaagaggtcaggatagggtgcaatacaaaaggcaaggagagaattctccccagagcatagaagtgggtgatggggaggtggargacagggaaagagtgatgcctaagttcagaaaaaactgtgaattttcaccccattaataacaaatatagaacaaacatgatcatgttaagagcaaatactaaaatttttaaaaaccctgatttccatcttctaatctgattaatgaaacgaatggtatatacatacacacacacacacacacacacatatgtatatatat

SEQ ID NO: 1257 - DNA, 401 bp, Homo sapiens
acatagtgagaatcaatgatcagtggcaaatagggtcatgccaaagggaaattgacagctctccgggccatgctgcctcttattccacatttcaacttcactctagttaaatttcagttaaccaatcatttgaagactgaagcaaacaacaacaaaaatctgtaacccacagttttcgtgggacatggttttctaaatgtygtgtcttttcttttctttatattgcttggtaccagatcatttttaggaatctccatattccataggaggaaaattgccagtctgaaagctcagtgtctttagcattttttttttgcttaccacatttttgccctctaggtgccaacctggattcactggagcaagatgtactgagaatgtgcccatgaaagtccaaaacc

SEQ ID NO: 1258 - DNA, 401 bp, Homo sapiens
tttttaagtttattaacataaaacttacattattcagacttgatacagtgattctggtcagaatgtccaatgagccatttactgatttataaaaactgacttaaaatatgaaagagagggacaaatgtatattttataaggcagtcatttgccttgaaataaaacattatatttatagtactttctaggaaaatattgtcraggttagtcagcttcaaatttgacctaacttgacacagaattcctagttgaaaaaaattgtgttcatcsatatgtggtgtgtggggggtgtgtgtgtgttcrtgtgtgtgtccacacgtatgtgtgtgtatacaggcactccataatcaatgtacagattttagggaggaaaaaagaaaaagcacccacactttcaatag

SEQ ID NO: 1259 - DNA, 401 bp, Homo sapiens
atgagccatttactgatttataaaaactgacttaaaatatgaaagagagggacaaatgtatattttataaggcagtcatttgccttgaaataaaacattatatttatagtactttctaggaaaatattgtcraggttagtcagcttcaaatttgacctaacttgacacagaattcctagttgaaaaaaattgtgttcatcsatatgtggtgtgtggggggtgtgtgtgtgttcrtgtgtgtgtccacacgtatgtgtgtgtatacaggcactccataatcaatgtacagattttagggaggaaaaaagaaaaagcacccacactttcaatagttaggggcagtacagagcaggtatgtcatatataaactaacataataggacctaattatagaatagctc

SEQ ID NO: 1260 - DNA, 401 bp, Homo sapiens
aaaatatgaaagagagggacaaatgtatattttataaggcagtcatttgccttgaaataaaacattatatttatagtactttctaggaaaatattgtcraggttagtcagcttcaaatttgacctaacttgacacagaattcctagttgaaaaaaattgtgttcatcsatatgtggtgtgtggggggtgtgtgtgtgttcrtgtgtgtgtccacacgtatgtgtgtgtatacaggcactccataatcaatgtacagattttagggaggaaaaaagaaaaagcacccacactttcaatagttaggggcagtacagagcaggtatgtcatatataaactaacataataggacctaattatagaatagctcaaatttagaatattttaaaagattgtaatttta

SEQ ID NO: 1261 - DNA, 401 bp, Homo sapiens
aaattattatatatagtgcttcccattatccttgttatgcaatgtactttttgatatatgtgtttgtgtgcatatatgtgtgtgtgtatatatatatatatatatatatatactttaaaaaatctggggagctttatttccttaaagggcagcaagtttttaagttttcaagtatccccggagcttacagagtttttctgrctagttaacgagaatacagtaaatggcccagggtacatctcttgatgtgtytgctacccaagctgttaaacccttctgctgtttgccaacatatttcacgtctcctttactccccaggcatgcccagtgaggcatgtgtttgcataagaaatattttgttaatgaaaaattaacatgtccaaagtcactaaaaagttcca

SEQ ID NO: 1262 - DNA, 401 bp, Homo sapiens
tgatatatgtgtttgtgtgcatatatgtgtgtgtgtatatatatatatatatatatatatactttaaaaaatctggggagctttatttccttaaagggcagcaagtttttaagttttcaagtatccccggagcttacagagtttttctgrctagttaacgagaatacagtaaatggcccagggtacatctcttgatgtgtytgctacccaagctgttaaacccttctgctgtttgccaacatatttcacgtctcctttactccccaggcatgcccagtgaggcatgtgtttgcataagaaatattttgttaatgaaaaattaacatgtccaaagtcactaaaaagttccacggcagaggcaggacccaaaaccaagatgattccagcacactcatctcctg

SEQ ID NO: 1263 - DNA, 401 bp, Homo sapiens
taaagacacagtgtgctggtattttgcacacctcataaaaagagacgttccctatgtgaactcacagaggcgtacctgagcactgcttcttaaccacacaccatttgtctggttcaatgtgcatgcacagagagccataatagtcatgtgtaatgtgttttggagtgcagtgtattgctcttttctgaaactttttccctwtctttcttttttttgtcaactttctgcattggcagagcatcttgggattgaatttatgggtatggaccaatcatcattccttttagcctgcagaatttagagcctatgagctgaaatctttttcccttcctactcttacctttcagttcctaactaatttcctttttctttagaagggatcatacagctataacaatgat

SEQ ID NO: 1264 - DNA, 401 bp, Homo sapiens
cctttgtgcctcgcagaacatctccaaagagggagaaacacaagggggagcacctctattactagggagcacgttgtgtactgaggggagctatctattggagtttcttccctcagggaaaaaaaaaattgtcccacttatgaaatggattattggcctatcctgcagggagggaaaaaattctaccattaccccaaaccmttctatccttaacagcatatttctcatttttatagctggagggtctgactatagaatgtattgtttctgtccccaacagtaaagtgaaagacagttgagatatataacttccccctcagtaagatcttctatgggttagaaaagacacagggggctgctatccgcatgcttctcaaaggtacagtttccagaggctcata

SEQ ID NO: 1265 - DNA, 401 bp, Homo sapiens
atcacagcccagggagctgtgctctgcatcctgggtcccagggagagaaggaccagtggggtgacagctttgcttcttagacatgtatcctaaaacctgatcaggataccaagatcaggaagagaggctacagcagcagcttcaaccagataacaccccatagaaattaattccctgtcctgtggctatgggggaggggargcagcagacatatgcaattaacatataagcactcacattccatgtcctcatctgacttttgctgcacacaaaatccgtgataccaactcaatatctcctggtacattgtttcaccgcaatgcaccagccgcttcgctttctaattgtggcttccacatgactgctagattaggagttatgctgtatggaatgacccttcc

SEQ ID NO: 1266 - DNA, 401 bp, Homo sapiens
aacatataagcactcacattccatgtcctcatctgacttttgctgcacacaaaatccgtgataccaactcaatatctcctggtacattgtttcaccgcaatgcaccagccgcttcgctttctaattgtggcttccacatgactgctagattaggagttatgctgtatggaatgacccttccaactttgcatccaccttttmttcccacccaagcatttcctccctctggttttcttttctttctttatttttcctcccttagtatcaggcatgctgtgccagggacttcagatggctccttaacttttaacctwgttttcccttcctcggtctctctgtcattctgtcagtctgtckgtcctcttggtttgtttttcctttccacctccaacccttttgat

SEQ ID NO: 1267 - DNA, 401 bp, Homo sapiens
tcgctttctaattgtggcttccacatgactgctagattaggagttatgctgtatggaatgacccttccaactttgcatccaccttttmttcccacccaagcatttcctccctctggttttcttttctttctttatttttcctcccttagtatcaggcatgctgtgccagggacttcagatggctccttaacttttaacctwgttttcccttcctcggtctctctgtcattctgtcagtctgtckgtcctcttggtttgtttttcctttccacctccaacccttttgatttgtttttgtatactctatgcagcattctagtcctttacccackgacttctcttttccttctcctcctgttaataatcagtgctatattaatttgatttgacaatgttcttga

SEQ ID NO: 1268 - DNA, 401 bp, Homo sapiens
ttatgctgtatggaatgacccttccaactttgcatccaccttttmttcccacccaagcatttcctccctctggttttcttttctttctttatttttcctcccttagtatcaggcatgctgtgccagggacttcagatggctccttaacttttaacctwgttttcccttcctcggtctctctgtcattctgtcagtctgtckgtcctcttggtttgtttttcctttccacctccaacccttttgatttgtttttgtatactctatgcagcattctagtcctttacccackgacttctcttttccttctcctcctgttaataatcagtgctatattaatttgatttgacaatgttcttgacctgtttactggaatttgattatcatgggctcggcttgtagga

SEQ ID NO: 1269 - DNA, 401 bp, Homo sapiens
ttatttttcctcccttagtatcaggcatgctgtgccagggacttcagatggctccttaacttttaacctwgttttcccttcctcggtctctctgtcattctgtcagtctgtckgtcctcttggtttgtttttcctttccacctccaacccttttgatttgtttttgtatactctatgcagcattctagtcctttacccackgacttctcttttccttctcctcctgttaataatcagtgctatattaatttgatttgacaatgttcttgacctgtttactggaatttgattatcatgggctcggcttgtaggaaatgttttgtttcatgataaggtccactgtatcctagaaattaaaattcactttttcatttcaagaaaacttcctgcaagctgccctc

SEQ ID NO: 1270 - DNA, 401 bp, Homo sapiens
tgtactggtgacttctttggacaaataaaacttgttcctaagtacaattggtggagtagttagaattgtcttccaaaggacaagtcaccatttgggcccataactgtcctacccatcacataggattttctttgatacagtgccctgctacctcatattgtattgcttcttgtgttcacattttactgttaaatcacagasagcctgactcaatttactagttaactacaagccaagttcatgtttgcaaatgtctttgaatttaatatatttaagttagaaatgactctttgtaaagaccactggatataaagtgatgatataaaatatctgggaaatacaaaaaggccaggggctgggggataaagaggggaggaaggaggaagtggggggcgcccagt

SEQ ID NO: 1271 - DNA, 401 bp, Homo sapiens
gaccactggatataaagtgatgatataaaatatctgggaaatacaaaaaggccaggggctgggggataaagaggggaggaaggaggaagtggggggcgcccagtgatgccaattccatctcctttaattggtgttgattcctgttgtctttgcaagagctttttatattttattttgcaagagactacaaaaaaaaataawactacagagttttaaccaaatagttattttataattaatgtttatgatttccaatttactatcaactatatatatctctatagcttataattagaagtaatttctgagtataatatttgtattgtaaatggccccagctggcttttttatatttatgttcaaagcatagtgcagagcatgttgtaccttagctatgtgtg

SEQ ID NO: 1272 - DNA, 401 bp, Homo sapiens
tcagtcctggcaagtggaagtgacctgtgatgacatctgctctcatccctttccagaggcggaggagctgtaccagaagagagtgctgaccataaccggcatctgcatcgccctccttgtggtcggcatcatgtgtgtggtggcctactgcaaaaccaagtaaaccttctttctccatgcctttctctctccttcatgcaragacagcttagatggccagggctttgcagaatctgagctccacagcctagtcttggggataaaaaaaaaaggaggggcagggggagattatttcctctgaataatccattttgaggatgtctcctaaacacagaaatagaaagctgtttgcctattcatgtaaagatttctgttcaatgaccacagcccctgagtggata

SEQ ID NO: 1273 - DNA, 401 bp, Homo sapiens
aatgaaatcccaggatcactagatccttccacttttaaagaagctatagtttcccagagttaagttcccaccgtcactgatctctttagctttttgctccttcctttcaggaattcaaaggaagaatgtggtctccaggggcattcccagccctaccatctcccctctgggtgccctccttcactgcagttcaccctgtaractttattcacatcaccaccaaggtgattccctgacaatgtgaacctcagtgagaggtgaacagagaggactccctgctcctcctctttcagacccaggagctgtctttagccccattctgaagaccacccttttcctgtatttccatccgggctttggtcaagtaagcattcctaaatcccttagagatgagggctctt

SEQ ID NO: 1274 - DNA, 401 bp, Homo sapiens
caaggtgattccctgacaatgtgaacctcagtgagaggtgaacagagaggactccctgctcctcctctttcagacccaggagctgtctttagccccattctgaagaccacccttttcctgtatttccatccgggctttggtcaagtaagcattcctaaatcccttagagatgagggctcttctcctttctgggtctagggstacatcattttgccttcaggtttgaattsctgttccttcagcctcatttctcactgattgcactgttttccctggagatggctttgaggacatcctggaggagccgtgctggggtgtcagcctgccaccctcccctgggcagctgccctgcctgccttcttaacctcacgttggactttcctgttttctctccctttcat

SEQ ID NO: 1275 - DNA, 401 bp, Homo sapiens
agtgagaggtgaacagagaggactccctgctcctcctctttcagacccaggagctgtctttagccccattctgaagaccacccttttcctgtatttccatccgggctttggtcaagtaagcattcctaaatcccttagagatgagggctcttctcctttctgggtctagggstacatcattttgccttcaggtttgaattsctgttccttcagcctcatttctcactgattgcactgttttccctggagatggctttgaggacatcctggaggagccgtgctggggtgtcagcctgccaccctcccctgggcagctgccctgcctgccttcttaacctcacgttggactttcctgttttctctccctttcattcatctttgccaagagatgattcttttaa

SEQ ID NO: 1276 - DNA, 401 bp, Homo sapiens
tttgccaagagatgattcttttaacaccctgactctggatcaaattgttttctatctcctgaagcttctcttcatttgagcttctcttcacttttgactttttttgctcatcgctatttgaaaacggagctatttctacttctttgaattctgaatgttcttctaagggatccaaataaccatcaacatgtaagaaaagckgtctckgtctttctctgagttcttctctaatcactgagagaactataggatatacacagtcatctttgaaaaacccatctcttgggtagtctyttgacctcccagtccctttgtaggaacatctctgctgaagcctgtccctagcatagacaggctgttcttgctttagagcctgaaatgtgtgcgtctcttttccttga

SEQ ID NO: 1277 - DNA, 401 bp, Homo sapiens
aagagatgattcttttaacaccctgactctggatcaaattgttttctatctcctgaagcttctcttcatttgagcttctcttcacttttgactttttttgctcatcgctatttgaaaacggagctatttctacttctttgaattctgaatgttcttctaagggatccaaataaccatcaacatgtaagaaaagckgtctckgtctttctctgagttcttctctaatcactgagagaactataggatatacacagtcatctttgaaaaacccatctcttgggtagtctyttgacctcccagtccctttgtaggaacatctctgctgaagcctgtccctagcatagacaggctgttcttgctttagagcctgaaatgtgtgcgtctcttttccttgactcaga

SEQ ID NO: 1278 - DNA, 401 bp, Homo sapiens
ttgactttttttgctcatcgctatttgaaaacggagctatttctacttctttgaattctgaatgttcttctaagggatccaaataaccatcaacatgtaagaaaagckgtctckgtctttctctgagttcttctctaatcactgagagaactataggatatacacagtcatctttgaaaaacccatctcttgggtagtctyttgacctcccagtccctttgtaggaacatctctgctgaagcctgtccctagcatagacaggctgttcttgctttagagcctgaaatgtgtgcgtctcttttccttgactcagaagaaatgaatttaagagatacatattgttttaatcaaaaactttttttcatttaaccagtaatacagatagtttcaagctatcatcc

SEQ ID NO: 1279 - DNA, 401 bp, Homo sapiens
tcagtttgtataacttctattgctctatctttaaatttactaattttctcttttacagtatctaatcagctgataattctgtctagcatgctgataattctatccatggaattttttttattttcataatttttagctgtaaaagttctgttttattctttttcaatcttctatttttctcattagtttcatggttattcytctaaatctatcaacatatttatgaaagcaattgtaaagtctactaaattgatcatgtctgttatttctggatctatttctgccatgaatatttctccaggttatactgaacatttttctttacatacctcaacatttttgtttggatgttgaatattaaattatcaggtctagattttgttgtcttctccttaaagaac

SEQ ID NO: 1280 - DNA, 401 bp, Homo sapiens
ctccaggttatactgaacatttttctttacatacctcaacatttttgtttggatgttgaatattaaattatcaggtctagattttgttgtcttctccttaaagaacattgaacaattttgttttggcagatacttaagtaatttgcaaatcaacttgatcctttcaagtctacttttaaaattttgttaggtcagatctaragtarcctttaccttagagttggttcagctctaatactaagatatgattcttctggagtctctcctgaatatctgagtttctaatgcattgtctctaagaactttaatgtctcccaaccctgtgtaagctctaggaatttgtcagattaaaactcaccagtagttttggcatactatgtatgacagtttcacccacacat

SEQ ID NO: 1281 - DNA, 401 bp, Homo sapiens
ggttatactgaacatttttctttacatacctcaacatttttgtttggatgttgaatattaaattatcaggtctagattttgttgtcttctccttaaagaacattgaacaattttgttttggcagatacttaagtaatttgcaaatcaacttgatcctttcaagtctacttttaaaattttgttaggtcagatctaragtarcctttaccttagagttggttcagctctaatactaagatatgattcttctggagtctctcctgaatatctgagtttctaatgcattgtctctaagaactttaatgtctcccaaccctgtgtaagctctaggaatttgtcagattaaaactcaccagtagttttggcatactatgtatgacagtttcacccacacatgtcca

SEQ ID NO: 1282 - DNA, 401 bp, Homo sapiens
ctgagtttctaatgcattgtctctaagaactttaatgtctcccaaccctgtgtaagctctaggaatttgtcagattaaaactcaccagtagttttggcatactatgtatgacagtttcacccacacatgtccagtgtactacgggcatcaggtcaagtggacttagatgcagagttctgaagttctacttctgtatacgtktctctcctcaggtactctgtcatctgaattccaacctcctttgcctcctctaatttcagcatctgtattttaagtkaagggagaacttcctgctttacttgaatttctttccttgtcccatgatctggacatgcttctaggtagaaatccagaaccaatgcagggctcactgcatttaccttttctcatggatcacagtc

SEQ ID NO: 1283 - DNA, 401 bp, Homo sapiens
aaaactcaccagtagttttggcatactatgtatgacagtttcacccacacatgtccagtgtactacgggcatcaggtcaagtggacttagatgcagagttctgaagttctacttctgtatacgtktctctcctcaggtactctgtcatctgaattccaacctcctttgcctcctctaatttcagcatctgtattttaagtkaagggagaacttcctgctttacttgaatttctttccttgtcccatgatctggacatgcttctaggtagaaatccagaaccaatgcagggctcactgcatttaccttttctcatggatcacagtcctgaacttcattttatcaaagatctaaaaacagctatttcatattgttttttaatattttatttatgatgcaaagg

SEQ ID NO: 1284 - DNA, 61 bp, Homo sapiens
gctctgggtcccagttgttggtttcagggtrgtgggttctcagcgatcctcagagagggag

SEQ ID NO: 1285 - DNA, 61 bp, Homo sapiens
ggctttgccactggagaaagcccaagtttartcctgggttggggcctcctgaaacttttta

SEQ ID NO: 1286 - DNA, 61 bp, Homo sapiens
tttaatcctttggggtttggctcaccaagtrgatcggaaatgtgccggctgctttcttgtg

SEQ ID NO: 1287 - DNA, 61 bp, Homo sapiens
tgagaattataaagttgttattggtgggggkttttttttttggccaagtcatctcaagaaa

SEQ ID NO: 1288 - DNA, 59 bp, Homo sapiens
attttttttttcctgcagttactcaaccttkcagtgggacaagttgctcaatgacttac

SEQ ID NO: 1289 - DNA, 61 bp, Homo sapiens
ctttacctgtcttgatgcacggtggagaaakgagacccgcttcgttttccctctaatctag

SEQ ID NO: 1290 - DNA, 61 bp, Homo sapiens
actgtgttgcctctaaatgtgatttaactcrcatattcagaatcttagcaaaaataaataa

SEQ ID NO: 1291 - DNA, 61 bp, Homo sapiens
tagattattacagctttgttgtcatattatytctaggcagtaaatcatagtaaagtagtaa

SEQ ID NO: 1292 - DNA, 61 bp, Homo sapiens
ttgccatcaccctagttctggccatcctcaytgaccacctgactttctgcctaaatggtct

SEQ ID NO: 1293 - DNA, 61 bp, Homo sapiens
taatatcttttaaaaaattaactgggcatgkcggtgcgtgcctgtagtctcacctacttgg

SEQ ID NO: 1294 - DNA, 61 bp, Homo sapiens
taatatcttttaaaaaattaactgggcatgtyggtgcgtgcctgtagtctcacctacttgg

SEQ ID NO: 1295 - DNA, 61 bp, Homo sapiens
aaaataaaattagaaaggataggtgtgtktgggagggagactggttaatcagggtgcatgg

SEQ ID NO: 1296 - DNA, 61 bp, Homo sapiens
ataggtgtgtgtgggagggagactggttaaycagggtgcatgggattatgtagggcttgtc

SEQ ID NO: 1297 - DNA, 61 bp, Homo sapiens
ggggtgggggtgtggtggggaagagggagrgggcgaggccaggggagggtgcgaaggaggc

SEQ ID NO: 1298 - DNA, 61 bp, Homo sapiens
ggggtgggggtgtggtggggaagagggaggrggcgaggccaggggagggtgcgaaggaggc

SEQ ID NO: 1299 - DNA, 61 bp, Homo sapiens
ggggtgggggtgtggtggggaagagggagggrgcgaggccaggggagggtgcgaaggaggc

SEQ ID NO: 1300 - DNA, 61 bp, Homo sapiens
cgcagcgcggcccgggccccacgatcctccycctgctcctcctactcctcctcctcctcgg

SEQ ID NO: 1301 - DNA, 61 bp, Homo sapiens
cgtggcctctccctccccctctccctcgccsgtcctcttcgccctgcgctctgagcgcccg

SEQ ID NO: 1302 - DNA, 61 bp, Homo sapiens
cgttgagtcgcgcggtgcttcccctcctggsggccgccgctcacctgggcgccgagtccta

SEQ ID NO: 1303 - DNA, 62 bp, Homo sapiens
cctgggcgccgagtcctaccgggcgcctacrcccagagctcagggcaagggacagcagtccc

SEQ ID NO: 1304 - DNA, 60 bp, Homo sapiens
gcagtcccggccgcaccctcccagagtccygggagcgcttcgctccctggcacggcccct

SEQ ID NO: 1305 - DNA, 64 bp, Homo sapiens
tgacttataaatgcttcagcttctctgttgcayggtgttctactactcttttactaggcgatac

SEQ ID NO: 1306 - DNA, 61 bp, Homo sapiens
ttctttctttttcaagtacatatttgctatkcagcaaaggattgaatgacttctcaggaaa

SEQ ID NO: 1307 - DNA, 61 bp, Homo sapiens
atttaaaatgtgcatattttattaagcaaayggcgtagagttatttggtttaattttctgt

SEQ ID NO: 1308 - DNA, 61 bp, Homo sapiens
ttatttggtttaattttctgtaagtaactcstaaagaattgtcctaaaagctgtgggtgag

SEQ ID NO: 1309 - DNA, 61 bp, Homo sapiens
ttccacctggccattggggaaatggaatttrttacaaatcagctgtacaaaaatagatttg

SEQ ID NO: 1310 - DNA, 61 bp, Homo sapiens
cagttcttttaaatttgtgtctggtgggggycaattatttaaatttctggttggcatttgt

SEQ ID NO: 1311 - DNA, 64 bp, Homo sapiens
gaaatatctgattgtctctcccatttcctcygcagctggagcaacggacacactgaaagcatcc

SEQ ID NO: 1312 - DNA, 61 bp, Homo sapiens
ttgactactaccggtaataaaatcaaatggrttcagtgctcacaactcttcagtctttggg

SEQ ID NO: 1313 - DNA, 61 bp, Homo sapiens
actactaccggtaataaaatcaaatggattsagtgctcacaactcttcagtctttgggcta

SEQ ID NO: 1314 - DNA, 61 bp, Homo sapiens
tattaacatgtgcatttgctttttaagaagwatacacacgtgtacctttagctttgaaagg

SEQ ID NO: 1315 - DNA, 61 bp, Homo sapiens
tgcctctggcatttaagtgccccatgtggcmtctgtcaccctcagatcttcccattttctt

SEQ ID NO: 1316 - DNA, 61 bp, Homo sapiens
cacattttctttatccatttatctgttgatrggcacttagattgcttccaaattttagcta

SEQ ID NO: 1317 - DNA, 61 bp, Homo sapiens
ctgtgtttttctaggtacttactatttctartgagttttgtacttttagataatttctgat

SEQ ID NO: 1318 - DNA, 61 bp, Homo sapiens
acttggtagtcccaagtgtctatttttgccktctttgtgtcattgagtacccattgtttaa

SEQ ID NO: 1319 - DNA, 61 bp, Homo sapiens
ttggaaacctggctacacagcaatgcctccrttgactagagtcagtcagttgcatgtttct

SEQ ID NO: 1320 - DNA, 61 bp, Homo sapiens
ctctgaactcatgtcttttgttttcctgggyttataccaatttcctttgcttttattttag

SEQ ID NO: 1321 - DNA, 61 bp, Homo sapiens
gttgaaatcatggttttaagaatccttattrtaactatgacaataaaagactgcatcatct

SEQ ID NO: 1322 - DNA, 61 bp, Homo sapiens
atagtaatatattttcaaaacattgtatttytgtatgttttgtctactaatgaaggtgttg

SEQ ID NO: 1323 - DNA, 61 bp, Homo sapiens
ggtctattctccctctactttgtatttctaractaatctagggtttttatattttgttaca

SEQ ID NO: 1324 - DNA, 65 bp, Homo sapiens
cttatcatatttgttagaatgcaatctagaraagcaaatattgactctttgaggatcaattccag

SEQ ID NO: 1325 - DNA, 65 bp, Homo sapiens
cttatcatatttgttagaatgcaatctagagaagyaaatattgactctttgaggatcaattccag

SEQ ID NO: 1326 - DNA, 61 bp, Homo sapiens
tacattcagtaagggcacaggaaacagagtyaatataaaagaatcaactggttccttgtgt

SEQ ID NO: 1327 - DNA, 61 bp, Homo sapiens
cccccagttggtcatagagtcagtatgatcygaataaaaatttcagcactcagttttgtag

SEQ ID NO: 1328 - DNA, 61 bp, Homo sapiens
accaagaattgctagatagctgatgaaattyctaaatgagatataacaactaaaaaagaaa

SEQ ID NO: 1329 - DNA, 61 bp, Homo sapiens
aaagaaatgtattgagaaggtatttagcgayatagggaagaacttgaagctgacttaggga

SEQ ID NO: 1330 - DNA, 61 bp, Homo sapiens
tagggataagtacataaaaagttaagcaaayaggggaaaaccagaaacaattgttagctcc

SEQ ID NO: 1331 - DNA, 61 bp, Homo sapiens
gtagtaaaaggtggggcctttggaagatgaktaggtcatgatgctaaagctctcatgaatg

SEQ ID NO: 1332 - DNA, 61 bp, Homo sapiens
acatttctttttctttcttctctttttcttyttctcctttttctccttctcccctccccct

SEQ ID NO: 1333 - DNA, 61 bp, Homo sapiens
agtttgcaaataactctcccttctccatgarggtaacttggaattcgatgtgtgtgtatgt

SEQ ID NO: 1334 - DNA, 61 bp, Homo sapiens
aaaaaaaaaattcatactttactagtgggckattattggaatatgaagcatttcagtttaa

SEQ ID NO: 1335 - DNA, 61 bp, Homo sapiens
tgtgaatgttgtcaagggcgccaaggatgckggacttgcatttagatgcccaagcctctgt

SEQ ID NO: 1336 - DNA, 61 bp, Homo sapiens
ggtaatggagaagcctcctccctcatgcccrtgctcttgtcaggcctgtttgttaaggtcc

SEQ ID NO: 1337 - DNA, 61 bp, Homo sapiens
gtaattttatggtttacaaagcatattgacwtccttgatttattcatgttgccagctgccc

SEQ ID NO: 1338 - DNA, 61 bp, Homo sapiens
gaaactctgtatattctgttacccagaagcyctctgaacccaatccttttgggtttttaca

SEQ ID NO: 1339 - DNA, 61 bp, Homo sapiens
gttaagtgtccttagagcatatttttatagyataaaaattgggaaaaaattaagataaaga

SEQ ID NO: 1340 - DNA, 61 bp, Homo sapiens
ctccctcactgagaagtctggaacatgccamatgttcacagtgaggctgttaaaacttcca

SEQ ID NO: 1341 - DNA, 61 bp, Homo sapiens
cccaggaggctctttgattcttcatatcacrttatttttacctgaggattgtagataccct

SEQ ID NO: 1342 - DNA, 61 bp, Homo sapiens
gggattagaagtccaggccagaagtctgaartcatcagcttgggttctgttgatgtgaagt

SEQ ID NO: 1343 - DNA, 61 bp, Homo sapiens
cagtaaaggagctgaaataagattttagttmattggtagccacacatgcccacaggctggt

SEQ ID NO: 1344 - DNA, 61 bp, Homo sapiens
agcaaggagaccagatgtggctattttaaamatttttcgttgatacataataactatacat

SEQ ID NO: 1345 - DNA, 61 bp, Homo sapiens
atttatttggttcacgtttgtgatgtctggmaaaattcaaaattgggcatctgtatttggt

SEQ ID NO: 1346 - DNA, 61 bp, Homo sapiens
aactgtatgtttttgcacattaaccaaactstcttcattcctcactccctcatccttccct

SEQ ID NO: 1347 - DNA, 61 bp, Homo sapiens
atactactgagttttatttgtgttcacattyagtgctatgttaaaaaattcacaaagtaac

SEQ ID NO: 1348 - DNA, 61 bp, Homo sapiens
aatgttaagaggtactataatagctatttasatggcagagttaggatttcctgtttctttt

SEQ ID NO: 1349 - DNA, 61 bp, Homo sapiens
ttacaatgctcttttagccctgccatctggrgatggcttaagtgttaaacagctcagtgaa

SEQ ID NO: 1350 - DNA, 61 bp, Homo sapiens
gctacagctgactcagtgagatgggaatgakgtcagaaagatgaggaaagggcagtccaga

SEQ ID NO: 1351 - DNA, 61 bp, Homo sapiens
tgacatgatctgacttcttttttaacaagayggctcttattgtatcattaacagcatggtt

SEQ ID NO: 1352 - DNA, 61 bp, Homo sapiens
cccttggccaaaagtaagcacgacctctctkgcattgtgaacaaaaagaggaattaactca

SEQ ID NO: 1353 - DNA, 61 bp, Homo sapiens
atgggatggctgcacagaggcacatggagawgaagcaaggaagccaccttcagcttctggg

SEQ ID NO: 1354 - DNA, 60 bp, Homo sapiens
tggggctttgtaaattggactgacaaagacrgcttaacaagagagaagcaggagtttatt

SEQ ID NO: 1355 - DNA, 61 bp, Homo sapiens
tgaataatcccttaggacagggttgcctgakgaaatgggggacacccagtcaaattggaat

SEQ ID NO: 1356 - DNA, 61 bp, Homo sapiens
aaagagaaaaaacagagtcaatgcggaaaaygctgccaagacaacattttcttcttaagat

SEQ ID NO: 1357 - DNA, 61 bp, Homo sapiens
ctaggatgagaccagaaggggtcattttaaygagattttcagatgactttgaatttatatt

SEQ ID NO: 1358 - DNA, 61 bp, Homo sapiens
caaaatagagataaaaaagactttatctcastaatgtgtcatgcaaataaggattaatcct

SEQ ID NO: 1359 - DNA, 61 bp, Homo sapiens
cgtgcttagaaactacccctgttaaatactkaatatataacatttgtaatgttcaaatacc

SEQ ID NO: 1360 - DNA, 53 bp, Homo sapiens
gccaaagacttttgcaatgagctaactrtgttcaattattgctttcagatcca

SEQ ID NO: 1361 - DNA, 60 bp, Homo sapiens
gttttatgttttaatggaaacatttcatgtytagagaataatgatgcttaaaatttatat

SEQ ID NO: 1362 - DNA, 59 bp, Homo sapiens
agacagagcttaaaggcctctgtttgttgsgtcactttaaaaacaaaccctactgccag

SEQ ID NO: 1363 - DNA, 64 bp, Homo sapiens
catgagggtaacagcccccatcgttcrttcaattacctccgaccaggtcccttccatgacacat

SEQ ID NO: 1364 - DNA, 59 bp, Homo sapiens
gtacatctgtagtctcagctacatgaaggckgaggcaggatgattgtttgaccctggga

SEQ ID NO: 1365 - DNA, 58 bp, Homo sapiens
gctcaaaaaaagttttaatttattggtgactkagctgggtaaaggttggccattacat

SEQ ID NO: 1366 - DNA, 89 bp, Homo sapiens
gacttagagatatgtttatattacattgtcaagtgaaaagtgttgtataatayatgtgtgattgacttttctttctttgcttttccttt

SEQ ID NO: 1367 - DNA, 558 bp, Homo sapiens
gacaaataagtgtccatttgtaagacttaggcaaagatggattgattaggaaatttgtgattttagtcaattatcaagttatttgtgttatcctatttttttcttgtctctcagtaaaacagctaaatttccataagaatcccaggtggcttttaaaatctgtttggtaaggatgtgtggtttcacttattctgggatacagtggacatactcccttccctcttcctcatcaccagtctactgccttgaactactcataggtgttggtagaataaagacttggctctactatgaaatgaarataatcaaaaaaaaataaatgctccctttcttatgtccaggaaacagcggaaaaagctgcatgaccgtcttcggcagagccttcggtctgaacgaaacaatacgatgaacattgccaatgggcctcaccatcctaacccaccccccgagaatgtccagctggtgaatgtacgttgactctggccagtggaaaaaactgagcctctctcctttgttcagacgccttgaagtttattttcgaaagctcttaagctttta

SEQ ID NO: 1368 - DNA, 558 bp, Homo sapiens; identical to SEQ ID NO: 1367

SEQ ID NO: 1369 - DNA, 554 bp, Homo sapiens
ggtgtcctttgctatgaatgttcaatgaggcgttctgagatcaccaagaatagaagagacacacccccggctgtcagaagtttaaccttggagaatgccatgaagggcaattctggaagaaaaaagagaagggaattcctcgtaggtttaagatcagaaagtggggaaggcgggggtgctcttaaatgcatcagccctactgccagcacagtggggactattaacacatcatattttttttttcctgcagttactcaaccttkcagtgggacaagttgctcaatgacttaccaggagacaattgttatttttaaaaatgtctttcttattttaactacaaggacttggcttgcttagaggctcttgctcaggagtctttaaatgcaaatgagggaaaccccaggttataaagcatctgcttctgcaggttttcaatcctgttaccttagcaacatttgcccttgtattccacgcatcaccttgacagcctgcataatataagggacggagcggagcaggggctcggggtgggagcctggaaagaaaactggggc

SEQ ID NO: 1370 - DNA, 401 bp, Homo sapiens
tgaatgcaaaaatatgtctccacagaagcattagcataatttactgtacattcaatgaaattaagacagccaataaggaatataattcttatttattttgaaatgatggtaacaaatggctttgttaccttcaagcttcttactggcttaagctcttttaaaattctatggactatataagctactcaattttaagttttyatttttgaattcaagcttttttggttaggtaaagaatagaagtaactaccataaagaagaaaatataatcatctaatttctcctgaactctgtataacattggccattaatctacatcaatatatggtgaagatatgtaagcagaatgtacaatgtataagacatgcatatatcaatataaggtagtaatgtttatttta

SEQ ID NO: 1371 - DNA, 401 bp, Homo sapiens
aaatggctttgttaccttcaagcttcttactggcttaagctcttttaaaattctatggactatataagctactcaattttaagttttcatttttgaattcaagcttttttggttaggtaaagaatagaagtaactaccataaagaagaaaatataatcatctaatttctcctgaactctgtataacattggccattaatcyacatcaatatatggtgaagatatgtaagcagaatgtacaatgtataagacatgcatatatcaatataaggtagtaatgtttattttaaattccgcagatccatttagattcctttggttttatatttggtctattttgttactgcctctataattctgcttatttatttcaaattttacaacatctatttctcctttgag

SEQ ID NO: 1372 - DNA, 401 bp, Homo sapiens
aagctactcaattttaagttttcatttttgaattcaagcttttttggttaggtaaagaatagaagtaactaccataaagaagaaaatataatcatctaatttctcctgaactctgtataacattggccattaatctacatcaatatatggtgaagatatgtaagcagaatgtacaatgtataagacatgcatatatcaatrtaaggtagtaatgtttattttaaattccgcagatccatttagattcctttggttttatatttggtctattttgttactgcctctataattctgcttatttatttcaaattttacaacatctatttctcctttgagaaaacgtagacaactgatattgggatagagtttaaattgtgagaaatattcagttacagtaaaag

SEQ ID NO: 1373 - DNA, 401 bp, Homo sapiens
aaatgcattagaactagaacttgcgtgattttaaattttattagaagtaggtgtcaagttacctaagatgtccaagagacagctgatgggttatgagttaaattttgggttctgcttatcatttcttagaaatcaatttaaggcatcagttttcaatagcttttttatgtataactaaaaaagagatatatgatatttggyaaaataaagatacatggcttccagtctcttgagacatctgtcttcatgaaagagatggagagttcccatttctacttacaagaatgaatgtatgtcataataaagaccagctatcatttgttatatacaaaatatgtggttctttctttgactttttttctggatttagacaaccacagatgacatttatgagaaatgaa

SEQ ID NO: 1374 - DNA, 401 bp, Homo sapiens
agttacctaagatgtccaagagacagctgatgggttatgagttaaattttgggttctgcttatcatttcttagaaatcaatttaaggcatcagttttcaatagcttttttatgtataactaaaaaagagatatatgatatttggtaaaataaagatacatggcttccagtctcttgagacatctgtcttcatgaaagagayggagagttcccatttctacttacaagaatgaatgtatgtcataataaagaccagctatcatttgttatatacaaaatatgtggttctttctttgactttttttctggatttagacaaccacagatgacatttatgagaaatgaactacactgaattcaactgagaaagtagaagattctgtatctccattaacttgtgag

SEQ ID NO: 1375 - DNA, 425 bp, Homo sapiens
tcttcattgcaatgctgtggtctcctgagttggttttgtctatgcagtgcaggaagaatctgttggctggttacaattttatattaagggagggtacccaagagaaaattctagcccatttctattgcttcatttttcacattgcatgcagtcagtggtgatgtactttctctctctctttttttagagagagagttcctttttttttttttttagagagttcctcattacttgttttgaacctaaasttataatttagtgtctgtgacagcacatttgattgtttttaaatgaaggtgataggaaaggcagaagaatgactagggaagaaaatctggagaacagatgacaagataacattgcttttgattctctgcaaacaagcatggtattgaaaaatgatccaaaatcgtttgcttgagcac

SEQ ID NO: 1376 - DNA, 401 bp, Homo sapiens
tatccagcaatacgtatctaaaaacgtcatctccagtgagcatattgttgagagagaagcagagacatccttttccaccagtcactatacttccacagcccatcactccactactgtcacccagactcctagccacaggtatgagaatttaaaaattccacggcttttctctcagaatgaattgttgcacattgcctttttgatatccctgcctaagaaaggaggcagtgaaatggatggtctttgggcagcaacagattttgaaaatcaactggctttgcccttaattcctgcataaatttgaacctcaattaggtaactccacagggccgttgtttcccattcctgagattgtctttactcatgccctgctactcaccgaattgctacactgggacaag

SEQ ID NO: 1377 - DNA, 714 bp, Homo sapiens
gaccagatcttacgagaactcggtcactatcatgagtacagtaccaagagggatggtgctaaaacgttcttgagaaatctgcccccatgattacaatcacctcccaccagagcccacctccaacactggggattacatttcaacatgtgatttggtggggacacacatttaacccatatcaactactaagctcattcttttttttttttttttttttttgagacggagtctcgctctgtcgcccaggctggagtgcagtggcgcagtctcggctcactgcaagctccgcctcccgggttcacgccactctcctgcctcagcctcccaagtagctgggaccacaggtgcccgccaccacgcccggccaattttttgtatttttagtagagacagggtttcaccgtgttagccaggatggtctcgatctcctgacctcgtgatccgcccgcctcggcctcccaaagtgctgggattacaggcgtgagccaccgcacccggcctaagctcattctttaaaaccttataaatacacccattcagtcctagccagcgtggccacacaatgtaagattctctctctcttctgttctctctctctctctttcactgacctttacaactttctatatcaactcacatttttgtcctttattttcgtctttcttatttaaatgacctctaaactactctaggataaaagtcactgtcattttt

SEQ ID NO: 1378 - DNA, 401 bp, Homo sapiens
ctctccctgtggcacaccctgtgaggggsacaagggaacttttcccattttactaccaaggccagtgacatgaatgatcaaatacyaaccagctacattttatttaatttttaatttttttagttgtcagaagattttattaactgtaagccagggaatggactgatcgattttattatgcaaatcaatgaaaaaaaaaaactcttttagaaggacacaaacacacacacgtgctcacagggaagctggttgttggttgagagtcaggtcagaaccttggagagctcaagataaagcgggggcagaaccacaatcagaagcttccatggctgccccccacatggatgagttttatttaattatttttttccttcaacttttattataagctcaggggtaca

SEQ ID NO: 1379 - DNA, 404 bp, Homo sapiens
ccctgtgaggggsacaagggaacttttcccattttactaccaaggccagtgacatgaatgatcaaatacyaaccagctacattttatttaatttttaatttttttagttgtcagaagattttattaactgtaagccagggaatggactgatcgattttattatgcaaatcaatgaaaaaaaaaaactcttttagaaggacacaaacacacacacgtgctcacagggaagctggttgttggttgagagtcaggtcagaaccttggagagctcaagataaagcgggggcagaaccacaatcagaagcttccatggctgccccccacatggatgagttttatttaattatttttttccttcaacttttattataagctcaggggtacatatgcaggatgtgcaggtt

SEQ ID NO: 1380 - DNA, 401 bp, Homo sapiens
attttatttaatttttaatttttttagttgtcagaagattttattaactgtaagccagggaatggactgatcgattttattatgcaaatcaatgaaaaaaaaaaactcttttagaaggacacaaacacacacacgtgctcacagggaagctggttgttggttgagagtcaggtcagaaccttggagagctcaagataaagcgggggcagaaccacaatcagaagcttccatggctgccccccacatggatgagttttatttaattatttttttccttcaacttttattataagctcaggggtacatatgcaggatgtgcaggtttgtgacataggtaaacctgtgccatggcggtttgctgtacagatcttcctgtcacctaggtattaaacccagcaccc

SEQ ID NO: 1381 - DNA, 405 bp, Homo sapiens
attaaaagatgttcttcaggcagaaaaaaataatatatcagactgcaatgtagacctatacgaggaaataaatttcattctttctttaagatactgactaccctaaagctgtctcacctagagccctttccctcaacttttcttttcttttctctctctctctctcccttcctttctgtcttctcttctcttctcttttcttttcatttcttttctttctttttgacagagtttcactctgtctcccaggctggagtgtgatatcggctaactgcaacctctgcctcctggcttcaagagatccttgtgcctcagcatcctgagtagctggaattacaggtgtgtgccaccatgcctggctaatttttgtattttcagtagagtcggggggtttcaccatgttgg

SEQ ID NO: 1382 - DNA, 401 bp, Homo sapiens
caaggcagtggcaagaatggctatcccagttttgggtcaaaacaagtgacaactaacaagacagagaacatatttatgcttgctactttaatgtttggtctcattatcttattagatatattgaacgatatttgtaaataggcagggaaaattgaagctttgtgtgtgtgcgtgtgcgtgtgtgtgtgtgttttattataaggtagcttttawagcaatgggatttcttctcataacagggtagaaggggcatggttccttccccattctgaagctttgtgttgtttttttgcttttttttctagtataaagagttcaattagggtaactctgccccttacctcatttgtcctggtgatacgtatgaaataacaccaatttgctagttagattaattgtga

SEQ ID NO: 1383 - DNA, 401 bp, Homo sapiens
tggctatcccagttttgggtcaaaacaagtgacaactaacaagacagagaacatatttatgcttgctactttaatgtttggtctcattatcttattagatatattgaacgatatttgtaaataggcagggaaaattgaagctttgtgtgtgtgcgtgtgcgtgtgtgtgtgtgttttattataaggtagcttttawagcaatgggatttcttctcataacagggtagaaggggcatggttccttccccattctgaagctttgtgttgtttttttgcttttttttctagtataaagagttcaattagggtaactctgccccttacctcatttgtcctggtgatacgtatgaaataacaccaatttgctagttagattaattgtgattagtgattagattaat

SEQ ID NO: 1384 - DNA, 401 bp, Homo sapiens
gttttgggtcaaaacaagtgacaactaacaagacagagaacatatttatgcttgctactttaatgtttggtctcattatcttattagatatattgaacgatatttgtaaataggcagggaaaattgaagctttgtgtgtgtgcgtgtgcgtgtgtgtgtgtgttttattataaggtagcttttawagcaatgggatttcttctcataacagggtagaaggggcatggttccttccccattctgaagctttgtgttgtttttttgcttttttttctagtataaagagttcaattagggtaactctgccccttacctcatttgtcctggtgatacgtatgaaataacaccaatttgctagttagattaattgtgattagtgattagattaattgtgtgcactc

SEQ ID NO: 1385 - DNA, 401 bp, Homo sapiens
aacaagtgacaactaacaagacagagaacatatttatgcttgctactttaatgtttggtctcattatcttattagatatattgaacgatatttgtaaataggcagggaaaattgaagctttgtgtgtgtgcgtgtgcgtgtgtgtgtgtgttttattataaggtagcttttawagcaatgggatttcttctcataacagggtagaaggggcatggttccttccccattctgaagctttgtgttgtttttttgcttttttttctagtataaagagttcaattagggtaactctgccccttacctcatttgtcctggtgatacgtatgaaataacaccaatttgctagttagattaattgtgattagtgattagattaattgtgtgcactccacttcttcttg

SEQ ID NO: 1386 - DNA, 398 bp, Homo sapiens
agtgacaactaacaagacagagaacatatttatgcttgctactttaatgtttggtctcattatcttattagatatattgaacgatatttgtaaataggcagggaaaattgaagctttgtgtgtgtgcgtgtgcgtgtgtgtgtgtgttttattataaggtagcttttawagcaatgggatttcttctcataacagggtagaaggggcatggttccttccccattctgaagctttgtgttgtttttttgcttttttttctagtataaagagttcaattagggtaactctgccccttacctcatttgtcctggtgatacgtatgaaataacaccaatttgctagttagattaattgtgattagtgattagattaattgtgtgcactccacttcttcttgc

SEQ ID NO: 1387 - DNA, 410 bp, Homo sapiens
aatatattagtagggcatggtggcatgcgcctgtcatctcagttagtcaggaggttaagttgagaggatcacttgatcccaggagggtgaggcttctgtgggctgtgattatgccactgcactctagcttgagtaacagagcaagaccctatctctaaaacaaaacaaaacaaaacaaaacaaaacaaaacaaaacaaaacaaaacaaaaggctaatgagcattaaacctacagaaaggaatctgagcagaaaaagccaatggtcaatgatagggaatcctgatttcttactgacacccaaaacactaataaatctcttgatgatgtatgagttgctgttaccttgcacagcagtgagcagttctatatggcaattgctcagttagctctcaacttcctgaacagcagtt

SEQ ID NO: 1388 - DNA, 402 bp, Homo sapiens
kacaagcagccaracccttttgccaakyacatgcccattatgaggcytatggaaaatgttgtgattaaagkagttcsttttccatgggcaccccatgtgtacttstgcwaaatggamcartagcttgmaaagccktaccagatkwgctgtstcagcttmcccwgtgggtcttactgatcaaggacattatagtaaataaaaaawaaaaatgagagagmcaaagaagagagtcatggacttgtcccagcagggtaggagtctttagatggttattgagaaactggatgaatgttgtggatattgatggtgttgaaacaaaagtattaatgcagcactattgaaggttagatgaaccaatgggactttctgtttgtctcccaacattgaaaggctccaacaagt

SEQ ID NO: 1389 - DNA, 450 bp, Homo sapiens
tcaacaaacaatgctgggcactgctaacacccagcccaggggaaagggcttgtaccctgacccaataggacctcttgactattttaatacagatggaagctgaagtggccatggggcagtgacctgctattctggctgctgaggtccaagagacccacccatgggagtctgatggccttccaaacttatggaagttctctgagggcacttgtagttttacactgatagactatgaatgctctcacccacagcatagatcaaaatgaaatacatcctgcagtacagttggtagaaatgggaaccactctgaataccacctgtgtcctccctgcaagaaggaggtgggccttgctatctaataatacacaatggaaaccagcctcagtacaagcctgtgagatgaggtggggtggttctttttgtcctcaattaactagaaacccagatata

SEQ ID NO: 1390 - DNA, 412 bp, Homo sapiens
cattgcacagtgataagtcactgcatgtgcgacagcagagaatgagccccgcctgggaaatagcctgtatctttccacttgtcctgactgattaacaatttatgctgcatgagtagaaaataattttgacctcattcactttattgcttgtgaaatcatggcagtatccatagactttttgcttaaacatttatattagtaggcatttttgtgttttcacatggctgcatgaaatgaacaggcacttttctaatatgaacatacagtgaatgaattaataactgtatgtttctaagagccacatttctgttagaactagccatataaggcatatgactaatgaattcagatatttaatattgaagtttaggaaaatgtcatttccactgggctgagaattagagtcaggagc

SEQ ID NO: 1391 - DNA, 404 bp, Homo sapiens
tggaggtgagggagggtgaaaatgtgcaatagatgatgacagtgttggagaaggcagaggtttttgccataaagaatctctagctgggatcacttgaggccaggagtttgagaccagcttgggcaacaaagtaagaccccagctctataaataaataaataagtaaataaataartaaataaataaataaataaataaataaatcagctgggcatggtggtgtgcatctgtagtcccaactactcaggaggctgaggcagaaggatcccttgagcctaggagttcaaggctgcagtgagctatgatgtgccactgcactccagcctggggaacagagcaagatcctgtcttttaaagaggaagagagagagactgactccattgggctttttctttttcacgtt

SEQ ID NO: 1392 - DNA, 404 bp, Homo sapiens
tctggcagaaaatgcatacagagagagaactcagcatgggagtttcttgtattttcaaatgacttctaattcctggttactccatgcacagaggttgtactcctggagagcttaaaggtaacaaatagctttgatggaatgtggctgcaaagatattaaccttcctacagaagagagattagcagcagacatgtgcctattgtgtgtgtgtgtgtgtgtgtgtgtgtataaaatcagtatgttcaaataaactgtctgggttgctgctttggtttgtgctaattattttgttttcaaagttttaggaaagaactccatttatattgttttaaagaaaaaacaaagattgactgaggtaaacttggagtaagtataggcataatcaaatagggtcccctagatca

SEQ ID NO: 1393 - DNA, 401 bp, Homo sapiens
accatcctggctaacacggtgaaaccccgtctctactaaaaatacaaaaattagccgggcatggtggtgggcgcctgtagtcccagctactctggaggctgagacaggagaatggtgcgaacccgggaggtggagcttgcagtgagccgagatcgcgccactgcactccagcctgggcgacagagcgagactcactctcmaaaaaaaaaaaaaaaaaaaaaaaaaaaggaaccaagttgtgagtgagaaggacctggaaaggcactgttagtggcagtggatccgtaggggtctgcaggaacctcaactcttgcgtcctcagaagaattcgacggaggaggcatgaggcagaaggagagacagaggcaagttttatagcagaagtgaaagtttatttaaaa

SEQ ID NO: 1394 - DNA, 401 bp, Homo sapiens
tataaggaagggatccagtttcagctttctacatatggctagccagttttcccagcaccatttgttaaatagggaattgtttccccatttcttgtttttgtcaggattgtcaaagatcagatggttgtagatgtgtggtattatttctgagggctctgttctgttccattggtgtatatctctgttttgktaccastacyatgctgttttggttactgtagccttgtagtatagtttgaagtcaggtagtgtgatgcctccagctttgttcttttggcttaggattgtcttggcaatgtgagctcttttcagattccatatgaactttaaagtagttttttccaattctgtgaagcaagtcattggtagyttgatggggatgtcattgaatctataaatta

SEQ ID NO: 1395 - DNA, 404 bp, Homo sapiens
tcttctcaaggagtatctttgtggcgttctctgtatttcctgaatttgaatgttggcctgccttgctagkttggggaagttctcctggataataccctgcagagtgttttccaacttggttccattctccccatcactttcaggtacaccaatcagatgtagatttggtcttttcacatagtcccatatttcttgaaggctttgtttgtttctttttactcttttttctctagacttctcttctcacttcatttcattcatttgatcctcagtcactgatatcctttgttccagttgatcgaatcagctactgaagcttgtgcattcattacatagttctcatgccatgtttttcagctccatcacgtcatttaaggactcctctacattggttattctagtta

SEQ ID NO: 1396 - DNA, 426 bp, Homo sapiens
actttaaaatatttagagaataaatgtttaagaatattttacagggtaggggaaaatttcttaagcaatcacatgtagcataatgtcaaaatggaaaggctgataaattagatttaaacaatctaattttaaattagatttaaacagtctaattttaaattagatttaaacagtctaattttaaattagatttaaacagtctaattttaaattagatttaaacagactaattttaaattagatttaaacagtctaattttaaattagatttaaacagtctaattttaaattagatttaaacagtctaattttaaattagatttaaacagtctaattttaaattagatttaaaaaattaaggccttttcttcgttcaaagatactttaaattttgtaaaaaataagcatcaaattgaaagaaatttg

SEQ ID NO: 1397 - DNA, 404 bp, Homo sapiens
tgcttataccatgatattttagtattccctcttgccttctccatttttcaatatctggtcggatagcaattctttatattgaattatttctgtaaaaataactgttggggtttctattctatatcttagatggactctaactgaattaatacatatgtaaatatatggtgaatatatataaattataaacatatgtctctatatgtatatatagatatgtgtctctatatcaatgtatgtattatagatatatacatatatgtatatatagaaccatagataattctccttaatatgcatgtacatagatatgtacatccatattatatgatatagaatatataaatataatatctaatatatgcatattaaggagaattatctatggttctaaatatgcrtta

SEQ ID NO: 1398 - DNA, 401 bp, Homo sapiens
aaggtttccactgaaaagtctgctgctaggcatattggctctccattgtatgttatttgtttcatttttcttgctgcttttaggatccctgctttatccttgatctctggcagattgattattaaatacttgccattttgagtctattttctagatcctgtaggtgtgcttcattgttttttattatttttatttttttttctcttgyctcctctgtgtatcaaatagcttgtcttcaggctcacacgttctttcttttggttgattaattttgctattaaagkactctgctgtatttttcattatgccaattgcatttttcagcttcagaatttctgcttgattctttttaattatttcaatctctgttaaatttatctgataagattctgaattccttc

SEQ ID NO: 1399 - DNA, 405 bp, Homo sapiens
tctgaccactgccctatcctgctatggctgagctggtatccaagatccaakacaaagtcctcccaacttttccctctcctcttctgaagtggaagaaagggatttcttttcgagctgtgagctgtgaagcctgggggtaggggaggggtgatgccggcactcctttatccacctcagctggtgtctcagtatgtcatgtgccccccccccccccccccagtccactgtttcaggacctggttcagcactgggactcacctaattgttgcagaccttatggactacattggctttcaagtttgtttggagacacagagcactttggtcactggtagtgaggtttgcaggaactcaagttctgacctctgggatccatgatccctctctgagtagtgccggtttaaa

SEQ ID NO: 1400 - DNA, 405 bp, Homo sapiens
tgttctctctcctctagcacccagagatgctctctgcaccatgccatgacttccagggggtggagaacaggtaatgtcaggggttcagggctcttttttctatctcttcagttgcctctttcagtgatatgaagttaaaaccaggtactatgagtgctcatctgatttttggttcttatgaagctgtttttttttttttttttttctgtgtagatagttgttaaattggtatctttgtggagaaggcaatcagtggagccttctgtkcggccatcttgctccttatacctgctactttgtattctctgatctatgtctcttcatttctccactcctctgttccaaccacccctggtaaccatgtttgtcttctctatttctgtatatttatttacttattttaga

SEQ ID NO: 1401 - DNA, 415 bp, Homo sapiens
ttaaatctttaatttgtcttgagttaatttttgcaaatggtgaaagatgggggttcagttttattcttctgcatatggctagccagctgttctaacaccatttgttgaataaggagtcctttccccattgcttctttttgttgaccttgtcaaagatcagatagctgtatacatgtagctttatttccgggttctttatttccgggttctttattctgttccattggtctatgtgtctgtttttgtatcagtaccatactgtttgggttactgtagctgtatagtatagtttgaagtcaggtaatgtgatgcctccagctttgttctttctgcttaggattggtttggctattcaggctcttttttaagttctgtatgaattttagaatagttttttttctagttctgtgaaaaa

SEQ ID NO: 1402 - DNA, 414 bp, Homo sapiens
gataaatttattacttttgttctttccttagtggacgtaataataattactactactttttgggcattacttctctgcttgtgatacggctctggcgagtagaggaacactagggctcttgtctcatgttcaattagataaaacaacatggacacacttggagtggttttaaggagcagagggtttaataggcaagaaaaaaggaagaagaaagaaggaagaagctcccctatacagagacagaggaaggggggctccaaagccaagagagggaaccccaagtgaagcagaaaccagccatgtgtatacagaggctggaggaggtggtgtctgatttgcacagggctcgggggattggtttgaccaggcatgtgattcacatagcctgggaaaaagctggccttcccaccctag

SEQ ID NO: 1403 - DNA, 414 bp, Homo sapiens
accccgtctctactaaaaatacaaaaattatttgggcatggcggcacatacctgtaatcccatctacttgggaggctgaggcaggagaattgcttgaacctgggaggtggaggttgcagtgagccaagatggcgccactrtattccagcctgggtgaaagagtgagtgagactctgacacacacacacacacacacacatacacacacacacacacacacacacacacacacaaagtagtaagcactcaggagttcgataaccacctttatgttgatggcttctaaatctctgatatcagtccagatccttttcttgacctcaactacagggccaactaactactagatttctcaaacactattaagacagaactcttcacctctcccaggtctccaaatttattcttcctctc

SEQ ID NO: 1404 - DNA, 433 bp, Homo sapiens
cttagaaaatatacccccaaaaagcttcagtttcaattagctgggcgtgatagcacgygcctgtaatcccagctactcgggaggctgaggcatgagaattgcttaagcccagaggtggaggttgcagtgagccaagaatgggccactgcactctagcctgggcgacagagcgagactccgtctcaaaaaaaaaaaaaaaaaaaaaaaaaaaaaaaaaaaaaaaaaaaaaaaaagaaatgaatgygcatatgactaccatcctaatataaatggagcttatgccagtactatttgcagtagtactacttgaaataatgctcacaataaattttatgcttattaaatagtaattatacataatatagaaagtcaaatagtgctacaaaacttacaataacaacactcattaacttgacccccttccaaatctgat

SEQ ID NO: 1405 - DNA, 412 bp, Homo sapiens
attcattcattcattcattcattcaacaatatttattgaataattatgatatgccagggactaagatagatgctggagatagacacaaacccctgcccttcagtatcttatcttctaatggttgaaggcaggtatgggattgcaagtaccaaaagatgggtgatatcaattttttgtttttttgtttttttttgagacagagagtgcctggtacatagtaagtgctcaaaagatggtgcctaaaaggatggaccaagtgttacacaagtcatattctatttggttaatacacttctccacttctgagaaacatattattgttaaagttaaggtagattaattatgttaagaataaatggtctgggcatggtggctcatgccctgtaatcccagcactttgggaggccgaggt

SEQ ID NO: 1406 - DNA, 404 bp, Homo sapiens
agtgagacctaattaaactaaagagcttctgcacagcaaaagaagctatcaatggaataaaaagataacctaaagaatgagagaaaatattcacaaactatgcatctgacaaagatctaatatccagaatttataaagaactaaaataattcaacaagtagaaacaaataatcccattttaaaaattgggcaaaagacataaagaaacacatctcagaagaagacatgcaaatatccaacagatatatcaaaaaatgctccacatcactaatcataagagaaatgaaatcaaaaccacagtgagataccgtattcatctgttctcatgttgctaataaagacataaccaagactgagtaatttataaaggaaaaaggtttagttgacccacagttcagcatggt

SEQ ID NO: 1407 - DNA, 404 bp, Homo sapiens
tcactcggttgcccaggctgcagtgccttagcacaatcatagctcactgcagcctcaagctcttaaggctcaagggatcctcccacctcagcctcctgagtagctgggaccacaggtgtgcaccactgtgtctggctcctattacacagaacattttacttggttttctcactgattttgtgatgttgtcctaattmcatagcgctggcacaaagattatataagcagtagggtactttgtggactcacgtgtggccaggtttgtcccaggatcttcaccctttcactcccttacttgtgactcaccccagcctatacagtgggaagaaattgaggtggagttgaagggattcatagaggtaatgaccccttggattgctggggagggctgtggcaacatcctc

SEQ ID NO: 1408 - DNA, 406 bp, Homo sapiens
ggaaggggaacatcacactctggggactgttgtggggtagggggaggggggagggatagcattaggagatatacgtaatgctaaatgatgagctaatgggtgcagcacaccagcatggcacatgtatacatatgaaactaacctgcacattgtgcacatgtaccctaaaacttaaagtataataataataataataataataataaatgtttagaaaaaaattctatcataaatatgaccatttaatttcctacaagtttttcaaaagtttcttcttgggtttattcatccctatggaaaattccttagagagatttargaatcttcagtgaatacttttagaacaaatggaaagaaagcaaaaatgctgtttcatcattgagaaaaataaaactcaaaacaagct

SEQ ID NO: 1409 - DNA, 401 bp, Homo sapiens
aaaacttgttttgtggctgcatagtattccatggtgtaggatgaagctggaaaccatcattctcagcaaactatcgcaaggacaaaaaaccaaacaccgcatgttctcactcataggtgggaattgaacaatgagaacacttggacacaggaaggggaacatcacacaccggggcctgttgtggggtgggggtagggggggagggatagcattaggagatatacctaatgtaaatgacgagttaatgggtgcagcacaccaacatggtgcatgtatacatatgtaacaaacctacacgttgtgcacatgtaccctagaacttaaagtataataaacatatatatatatatatatatatatatacatatataaacttgttttgtgaattttgaaatagtttt

SEQ ID NO: 1410 - DNA, 403 bp, Homo sapiens
catcacacaccggggcctgttgtggggtgggggtaggggggagggatagcattaggagatatacctaatgtaaatgacgagttaatgggtgcagcacaccaacatggtgcatgtatacatatgtaacaaacctacacgttgtgcacatgtaccctagaacttaaagtataataaacatatatatatatatatatatatatatacatatataaacttgttttgtgaattttgaaatagttttacacatacataggcattgcgataatgctacggacagttcccacagtccctgttacctagtgtccatcatggaaagcatataacgtaatcatagcacaattatcaaaaccaggaaatcaacattggtaaatgctattaactaaaccatagatcttttccagat

SEQ ID NO: 1411 - DNA, 403 bp, Homo sapiens
tatagaagctcagtgatctttttattctgttttactcaggctattctgtattcaggtaggatatctatcacccttactcttctctaaccccatcttaaaaaacaaagcggcggggagtttttcttttgatatcagcaacagataaccaaataagatggcgtataatcctttttttttttttttttttttttttttttttttttgagatggagtctcgctctgtcaccgaggctggagtgtggtggcactatctcagctcactgcaagctccgcctcctgggtccacaccattctcccgccttagcctcccaagtagctgggacgacaggctcccgccaccacaccaggctaattttgtttctgtatttttagtagagatgggggtttcaccgtgttagccagg

SEQ ID NO: 1412 - DNA, 407 bp, Homo sapiens
tgttttatgtctgtgattgtaagcttttagcagtttctcttcttctatttctttttttttatattttttattatactttaagttttagggtacatgtgcacaacgtgcaggtttgttacatatgtatacatgtgccatgttggtgtgctgcacccattaactcgtcatttacattaggtatatctcctaatgctatccttcccccctcccccctcccccctccccccaccccacaacaggccctggtgtgtgatgttccccttcctgtgtccaagtgttctcactgttcaattcccacctgtgagtgagaacatgcagtgtttggttttttgtccttgcgatagtttgctgagaatgatggtttccagcttcatccatgtccctacaaaggacatgaactcatcatt

SEQ ID NO: 1413 - DNA, 404 bp, Homo sapiens
tcctaaatcctaatttagctgtgggaagtttggatcaatggaaattaaactccatatatgccaacactatgggttgataacctcttccaagaatcattgcctgaccatcatgttccttctacctgaccactccttcctgcacttttatcacatattactctaagggatcatgtctaactttttgtcttcctcaattagactgagtatttcttgaggccaggaaatgcatcattttatccatagcatctaactcaatatctaatgtgtaataaactcttaatagaaatttacttaataactagatagatagtttaagatatgcccttgatgtagtcaagaagacaaaatgtatgggtacatttccttcttgtgtctggttcctctttctgcattgtcagggcaag

SEQ ID NO: 1414 - DNA, 404 bp, Homo sapiens
aaacattttcagaaaaaaagttgctgtgtttccgggagaagcagatggctgctattgagagacacctaggtttgtgttctgggaatctgtctcctactcatgatagcagggggcagattcagatctgcaggaggtagaaataggcatcagatcactctgtcctaaaaaacaaacaaacaaacaaacaaacaaacaaacaaacaattggaagaaatgaattgatcacagaagcatctagagctaggaccaattaaaagtcagttagtttatatgacctatttgaagatttctcaacaatcttgacctattgcttaagagcacaacatttgtagtaaaatgagcctaagttaggatatgacttaagatcactgaccagctgtctaagcttgttagggttacccaat

SEQ ID NO: 1415 - DNA, 527 bp, Homo sapiens
atgattttggtgctttaaaatgaacttgttttattgcttatcatatggtccaattttgttaaacattcaatttgccctgggaagtaacatgcattttgcttattttaaaagcagtgcattataaatgcaaattaaggcatttatatataatgacatatatatgtgtgtgtgtgtgtatacatatatatgtatacatatatacgtatatatacatatatatgtatatatacatatatacatatatacacatgtatacatatatatgtatatataaaatgacatatataatgacttacatatattgactggcaatatccctactggtatttgcttttgacttgtttcmtcagctactgggagaggtatgtcaaaatctcaaactttggttgtgaatgtactattctttataaaatttaaaactgtgttattaggtctataaacattaagaatgtttgtatatttttggtgtaatgacccttttatcagtatttttttcatatttatctctagaaatgctttgaagccta

SEQ ID NO: 1416 - DNA, 404 bp, Homo sapiens
atgaagatccaaaggcataagaatgatacattggacttcggggacttgcagggaaagtttggggactggcgaaggataagagaatattcactgggtacagtgtacactgctctggtgatggctgcaccaaaatttcagaaatcactactaaaaaacttactcatgtaaccaatcaccccctgttccccaaaaacctattgaaataaataaataaataaataaataaattgaatgaatgaaccaaaggtattgcacgaggaagcaacataaataaacttagtgagtgaaacagtgaagaaaggggcaatgtgatggtggtgataggtatacaggttaccttgttcacccttttaatactgtggataaacagaatcaagtaatttgttcagctaactagattccat

SEQ ID NO: 1417 - DNA, 404 bp, Homo sapiens
cctgcaaggcgctaacagtgaactttctatccaaaaagatagaaagaagttgtctctggttttgaacaatgaagatttatatctaacttatattgaaaaatcaaaggattagattttttaaactgaataagaaccatagctgtacttagagaatatctgtgatgcacttggcactgtgataagatgtgatgtatatcactctttatgattacaccaaccctgaatggcacttattttcaggtgtgacactagcctatggcggctgtcatgagrattagaaaatggtgtcccctccaggaggatactgcctgtgcctgagaatagagcacaggctgcatctaaggacccactgaccttctaggccagatatctttgtgtgtggcagagcctgcctaaatgtacat

SEQ ID NO: 1418 - DNA, 402 bp, Homo sapiens
gtctctagtaaaaatacaaaaaaattaactgggtgtggtggtgcattcctgtagtcccagctacttgggatgctgaggcaggagaatcacttgagcccaagaggcaaagttgcagtgagccaagatcatgccactgcgctccagcttgggctacagagtgagactccatctcaaaaaaaaaaaaaaaaaaaaaaaaaaaaaactactacttatcaaggaatgttttgaatgctttaattctttgacttaaattactatatwtatttataaaggtgtagaagatttracaactggaatgtgtgtgtgcgcatgcacatatacacacatatgcacatatgtatatatgtgtatgtataacatatatatctataaataaaagttatttaccaaagcatcatatat

SEQ ID NO: 1419 - DNA, 412 bp, Homo sapiens
agagagcgcactatttctaccccatcagagaacatgaagggatgcagagaagaatatgttgagttgactacctacctcacagaggacctctgcatgacatttagttgaagggaactgccttctctttttccaggaagattaaatctttatcctctctgccattcagtttaatacctatgtgcaaggcatcagtagagaccagatagatagatagatagatagatagatagatagatagatagatagatagacagacagatagataggcagagatgtttgtgtgtgtgtttgtgtgtgtgttgtgtgtttgtatctctaagtacatgaagaattggcatacatcccagaacacaacagactgaaactcctgattaaagataacaggtaaatggaatggacatccaataaaaac

SEQ ID NO: 1420 - DNA, 407 bp, Homo sapiens
ctgagttgaaataattctagctcatagttaatctataaagccttatccagagaaattggagattatctttaagcattttgaaatattaagcatagcctgctggccccaaatgacattttttttaatatttacaaattattaataaaactaaaaatttccatcccttccctggaaccccaagcaaccaccgattatttatttatttattatttatttatttatttatttatttatttatttatttatttattcattatagagatggagtctcactatgctgcccaggccggtcttgaagtcctggccccaagtgatccctccgcctcagcctcccaaaatgctgaggccacaggcacggatgcagagtttgcagatgggcagctaccattttcgagtatgcagtaact

SEQ ID NO: 1421 - DNA, 404 bp, Homo sapiens
ccttatccagagaaattggagattatctttaagcattttgaaatattaagcatagcctgctggccccaaatgacattttttttaatatttacaaattattaataaaactaaaaatttccatcccttccctggaaccccaagcaaccaccgattatttattatttatttatttatttatttatttatttatttatttatttattcattatagagatggagtctcactatgctgcccaggccggtcttgaagtcctggccccaagtgatccctccgcctcagcctcccaaaatgctgaggccacaggcacggatgcagagtttgcagatgggcagctaccattttcgagtatgcagtaactgagttttgtgagaagagcaaagtggaaagggagaatgacttaatt

SEQ ID NO: 1422 - DNA, 404 bp, Homo sapiens
gctgggcatggtggaggctgtgcttgtagtcccagctacttgggaggctgaggcagaagaattgcttgaatccaggaggcagaggttgtagtgaggtgagatcacgccactgcactccagtctggtgacagagtgagactgtctcaaaaaaaaaaaaaaaaacatatatgtgtgtgtgtgtgtgtgtgtgtgtgtgtgtgtgtgtgtgtgtgaaattatgacagaatttacctgtaaggtgttagtcatggaatactatgcagccataaaaaagaatgaaatcatgtcctttgtagcaacatggacgcagctggaggccattaccctcagtaaattgaggcagaaaaagaaaaccagataccacatgttctcacttacaagtgagagctgaactgagtatgcat

SEQ ID NO: 1423 - DNA, 409 bp, Homo sapiens
ccctgtctctactaaaaatacaaaaattagctggacatggtggtgtgcgcctgtagtcccagactcaggaggctgaggcaggagaatcagttgaacccaggaggcagaggttgcagtgaagccgagattactgttgattactgttacactccaacctgggtgagagagagactctgtctcaaaaaaaaaaaaaaaaaaaaaaaaaaaaagamcaaaacaaaaaaaagcctaaattatacaacaggatccatgggagaacatcttgatagctttttagcaggaacatcacattccaaatgcttgctagctattttctgagtatcagttatatttaccatgatcctgaggagcagaccctttattgtgtcccagttcagtttgcatcgtcttcatacagcataaggcaaca

SEQ ID NO: 1424 - DNA, 471 bp, Homo sapiens
tagaaggagtaggacagtaaatgtaaatgtctgtcctaatggattgttttatacattagagaacaattttttaagtgatcgagtaaacaaagtccccctcctacctccatggtgattgtttctcatagatgaaaacagttttctcatcctgacgacgacaacaacttcttcttcttcttcttcctcctcttcttcttcttctctttttctctttctttcctctttatttttcttctttctttcctcctcctcctcctcttcttcttctgcttcttcttctgctgcttcttcttcttctccttcttcatcatcattatctcatcatcattatcatttcagtgaccagttagtgagcaccttcatgtccaagcactgtctggggtcttcacagatgttatcctaatcttcacaccagtttaatacaagtgtgttaatatatttgatatgagtgctaggatatagtatttggag

SEQ ID NO: 1425 - DNA, 401 bp, Homo sapiens
ataataagatcctgtctctacataaaatttaaaaagttagttgggcatggtggcatgtgcctatagtaccagctactcaggaggctgaggcaggaggatctcttgagccaaagaggtcaaggctgtagtgaactatgattgtgccattgtactccagcctgggtgacagagcaatactctgtctcaaaaaaaaaaaaaaaaaaaaaaaaaggacttcaaatagcttacctatgaagaagctgcttggtaataccttaaatttcccttctatgcttttacacagaaccctaaccttgcagttgaggacttgagtcatctcacaattcttttgggtaaaaaaaatgtaaactactgtgacccaactttctttacagctgggaaggcctctatttgattgaaaa

SEQ ID NO: 1426 - DNA, 426 bp, Homo sapiens
ttttttccaatgtattccagaacccccatggatatcaaaattaaatgctsaaatcccttacataaaatggcatagtatctgtatactttaagcagattacttataatacctaatataatgtgaatgctatgtaaatagttgccatactgcatttttaaaattaatattattttttaatattttaacctttttttttttttttttttttttttttttttttttttttgagasggagtctygctctgtcacccaggctggagtgcattggtgcaatctcagctcactgcaacctccacctcccaggttcaagcaattctacctgcctcagcccccaagtagctgggattgcaggcacaggccaccacacccacctaatttttgtgttcatagtagagacggggtttcgccgtcttggccaggctggtc

SEQ ID NO: 1427 - DNA, 404 bp, Homo sapiens
agagaggctccttccactctcagagcttccaacttaaccatctgtgaagagtaggtccttcaaaaccaactgtagcggcaaagttctgagrtgatatttccagactcagcagataggaacaggcatgctaggtgagatatggcagggaatattagtcagggttctccagagggacagaaccaatttgtgtgtgtgcgtgtgtgtgtgtgtgtgtgtgtgtgtgtgtgtgtgtgtgtgtgtgacagagacagacagaaagagagtgctttagtttaaggaattggctcacaattatggagactggcaaatctaaaatcttcaggctgggttggcagtctagagactcaggaaaagctgatgttgcagtttaagttcataagatttctgttgtcagaattctctct

SEQ ID NO: 1428 - DNA, 425 bp, Homo sapiens
  misc_feature (1)...(425): n = A,T,C or G
nngcagaagatagggtcattgtagagtggaaaaacatatctgaaacatggttgttaagtcataagctaatatttggaaagacagactccacttacttttttccaatagatatatatttactaaaatcttgggaaagctaagcttatgatcaggtgtaaccaggccatatcccttgggtcccaaagtcaataagcagggagagcttggtgtttaagtccttaggaatgggtcatgccactcagaaaagagaagagatgtttcgatctgtggattgttatcatctgcaacccaggaggctctttgattcttcatatcacgttatttttacctgaggattgtagataccctacagtcttaaagcctctggccaatctgccttggaaccacaggatacattaggcaaggtctggggctggctttgacaa

SEQ ID NO: 1429 - DNA, 407 bp, Homo sapiens
tgagatctggttgtttaaaagtgtgtagcacctccccaaccgatctcttccccttttgccttccaccatgattatgagcttcctgaggccctcactagaaatagatgctggagccgtggtggtacagcatgcaggactgtgaatcaattaaacctcttttatttcttaaattacccagcctcaggtatttcttttctttcttttttttttttttttttttttttgagatggactgtcactctgtcactcaggctggagtggagtggctcactgcaaccttcgcctcccgggttcaagcaattcttctgcctctgcctcctgagtagctgggactacaggtgcgtgtgcccacgcccagctaatttttgtatttttggtagagacagggtttcaccatattagccagg

SEQ ID NO: 1430 - DNA, 416 bp, Homo sapiens
gctggagatataaatttagaagacattggaatataggtttaattaaagccagttggccagatgagatcctccatgtaaagattatagatagagaagataagagggatcaaaaccaagccttggggaattccagtattaagagttgccagagaaagaaaccaacaaagacagaaaaagcaatcagtacggtgggaagaaacgtcataaaggcatgaaatgtcataaaggcatttcaggctagagaaagtgtttaattaaagagaagaaagaagaacttccattgcatttggcaatggaggtcacatttgtgatctggacaggatagttgcagagagtaatgagtttaagttgtacatcaaagtaaaagacacacactctggccaaaggaacagccacagaaggctggcatatgatgt

SEQ ID NO: 1431 - DNA, 403 bp, Homo sapiens
tgattttaaaggcccttgaaaacaaaataattatcttattaaaatttagttacatgttgtgtttaaaatgctaaagttttggccagcygcagtggctcacgcctgtaatcccagtactttgcccgagatgggcagatcatgaggtcaggagttcaagaccagcctgaccaacatggtgaaaccctgtytytactaaaaatmcmacaacaacaacaacaacaacaacaaattagccaggagtggtggtgcgtgcctgtaatcccagctactcaggaggctgaggcaggagtatcgcttgaacccaggaggcggaggtcgcagtgagccgagattgcgcaacagagtgtgactcagtcttaaaagaaaaaaaaaaattctraaatttatcggagaaaacaattgg

SEQ ID NO: 1432 - DNA, 401 bp, Homo sapiens
tggtgaaaccctgtytytactaaaaatmcmacaacaacaacaacaacaacaacaaattagccaggagtggtggtgcgtgcctgtaatcccagctactcaggaggctgaggcaggagtatcgcttgaacccaggaggcggaggtcgcagtgagccgagattgcgcaacagagtgtgactcagtcttaaaagaaaaaaaaaaattctraaatttatcggagaaaacaattgggatctatttttagtctcaaatgtaggcatatacaaaaataatacatagtagttttctaagtactattagacatttgtttcccattttgccatttgctttcagtttacctgacatgaagataaaaatgatagctatttctcacttggcatttgaaagacaagagcaataaga

SEQ ID NO: 1433 - DNA, 402 bp, Homo sapiens
tagagaaatattagtaggttagttagtattcctaataaagaactgctaataccttatagagacataagccatgtttctcgtctttcgtttctgaaatgaaattttggccagggaaacattttgcatccctttttgatgtctacaaatgtggcatttgtcagatgtgagatagttaagtgtgtgtgtgtgtgtgtgtgtgtgtatatatatactttatatatgtatatatacatatcctatgtgtgtgggtatatatatatatatatatatatatatatatatatatgaatgatgcatggagagatatctcttcccwtgcatccaaaatattcacaacttttcactaatatctgaataacatttgaaaaattgacaactcttctggctaaagatcagcataca

SEQ ID NO: 1434 - DNA, 401 bp, Homo sapiens
tcgtttctgaaatgaaattttggccagggaaacattttgcatccctttttgatgtctacaaatgtggcatttgtcagatgtgagatagttaagtgtgtgtgtgtgtgtgtgtgtgtgtatatatatactttatatatgtatatatacatatcctatgtgtgtgggtatatatatatatatatatatatatatatatatatatgaatgatgcatggagagatatctcttcccwtgcatccaaaatattcacaacttttcactaatatctgaataacatttgaaaaattgacaactcttctggctaaagatcagcatacacattcgttccacagagacttgtgccaaaatcttgctcagctcaaggggtactgcacaataaacaataagaaacttttataact

SEQ ID NO: 1435 - DNA, 402 bp, Homo sapiens
ggaaacattttgcatccctttttgatgtctacaaatgtggcatttgtcagatgtgagatagttaagtgtgtgtgtgtgtgtgtgtgtgtgtatatatatactttatatatgtatatatacatatcctatgtgtgtgggtatatatatatatatatatatatatatatatatatatgaatgatgcatggagagatatctcttcccwtgcatccaaaatattcacaacttttcactaatatctgaataacatttgaaaaattgacaactcttctggctaaagatcagcatacacattcgttccacagagacttgtgccaaaatcttgctcagctcaaggggtactgcacaataaacaataagaaacttttataactccgactaatagaactcattgcttttcca

SEQ ID NO: 1436 - DNA, 401 bp, Homo sapiens
cataggcatggacaaggacttcatgtctaaaacaccaaaagcaatggcaacaaaagccaaaattgacaaatgcgatctaattaaaytaaagagsttmtgcacagcmaaagaaactaccatcagagtaaacaggcagcctacagaatgggagaaaatttttgcaatctattcatctgtcaaagggctaatatccagaatmtaacagtgaactcaaacaaatttacaagaaaaaaacaaacaaccccatcaaaaagtgggtgaaggatatgaacagacacttctcaaaagaagacatttatgcaaccaaaagacacatgaaaaaatgctcatcatcactggccatcagagaaatgcaaatcaaaaccacaatgagataccatctcacaccagttagaatggca

SEQ ID NO: 1437 - DNA, 420 bp, Homo sapiens
caagcattcatagcatagtatatcatgtagcagggtttaaaataagcatagaagagggtttcgccaaaagattatttaagaaaatctactaaaagagggttcttctgaaaaataaaatgtatttgcttttatcaaatgagcaaacttcatccacttggagatcacccacatgtgaatttctttctttctttctctctttcccttccttccttccttccttccttccttccttccttccttccttccttccttccttccttccttcttactttctttctctgatggtaagttacattagaggacaggaaggctcagtgatcagttttgatgggatggctgcacagaggcacatggagaagaagcaaggaagccaccttcagcttctgggtctctttgttatacaggaaaggaagtcaactg

SEQ ID NO: 1438 - DNA, 408 bp, Homo sapiens
accagcctggccaacatggtgaaaccccgtctctactaaaaatataaaaattagccgggcgtggtggcacatgtctgtaatcccagctattttggaggctgaggcaggagaaccacttgaacctgggaggcagaggttgcagtaagccaagatcgagccactgaaaccccagcctgggtaagagagtgagaccctgtctcaaaaaaaaaaaaaaaaaaaaaaaaaaaaaaatacttggtgcacttatgaaagcctgcagagcccagaaattctgatttaattgatctaagaaaagggagaggtaaaagctcccaggaaagtctagtgcccagccaaaggccatgggagtgatgagtgaccctgcccacacctaacggagcgtcccctgctctgctagtcagtcaacag

SEQ ID NO: 1439 - DNA, 408 bp, Homo sapiens
tgataggaggttctcataacagtccaaatgagaggaccaaaaggcctggagtcacgtcattgcagtaaaatggaagaaaaaacaagagtataaatgaagtgtcaaagatgttaagaaacaggatcttttaaaaaattatttttaattattatgggtacataataagtgtatatatacatggggtacatgtgaaattttgaaattttgatacatacaatgtataataatcttatcggggcaattggggtgtccatcacctcaggcatttatcatgtcttrtattagaaacagtccaattctcctcttttagctatttgaaaatatacaataaattattgttgagtatcatcactctgttgtgctatcaaatactagatcttattctttctatctaactatgcttttgca

SEQ ID NO: 1440 - DNA, 401 bp, Homo sapiens
ctcctcccaaaatgttatagacgtgagctaccacacccagccatgagtgtacattataaataaataccaataatgtactttcacatatgaaaaggctataaaagtatgcaaatatattatggcaacatctgttaagggataaagtgacacactgttgctcataactcgaaagaatatatatatatatatatatatatatatttttttttttttttcttttgaaacggtgtctcactctgtcaccaggctggagtgcagtggtgcgatctcagatcactgcaacctccgcctcctgggttcaagtgattctcctgcctcagcctcctgagtagctgggactacaggcatgagccaacatgcccagctaattttcatatttttagtagagatagggtttcacc

SEQ ID NO: 1441 - DNA, 407 bp, Homo sapiens
caccctgtcagagccctcaaagtcagacaaagaaggatgaaacatgttttggtccttaataaagaactgctgattgactgtttgaaaaacaaatgccgcacacctgtaatcccagtgctttgggaggccaaggcaggaggattgcttgagcctaggagtttgagaccagcctgggcaatatgatgaaacctaatctctacaaaaaaaaaaaaaaaaaaaaaaaaaaaagagccgggcatgaacctgtagtttcagctacttgggagactgaggtgggaggatcgcttgaaccctagaggcagagttacattgagctgagattatgccattgcactctaccctagggtgcaagattctgtctccaaaaaatgaaaaacagctgtatggtttggagagccagtggctga

SEQ ID NO: 1442 - DNA, 404 bp, Homo sapiens
gagtagttattgctgaatgtgtttggggtttcagtatgtggtgaaaaattctggatacagatgctcacatgtcattgtgggtgtctttcatgcaactgaattaggttttttttttgtttttgtttttgtttttttttttcagataaaccatgaatcacattttatttattttgtcctttcatttttttttttttttttttttttgagacagagtcttgctctgttgccaggctggagtgcatggtatgatctcggctcactgcaacctccacctcctgggttcatgctattctcctgcctcagcctcccgagtagctgggattacaggtgcccaccatgatgctcagctaattttttgtatttttagtagagacggggtttcaccgtgttagccaggttggtct

SEQ ID NO: 1443 - DNA, 417 bp, Homo sapiens
tcctgacctcgtgatccacccacctcggcctcccaaagtgctgggattacaggcatgagcctcaacttttattttacgttcagatggcacatgtgcaggtttgttacatgggtaaattgcatgttactggggtttggtgtacaaattattttgttacccaggtggtgagcatagcatagtacccaataggtagtttttccctttttttttttttttttttttttttttgagacagaatctcgctctgtcgctcaggctggggtgcagtggtgcratctcagctcactgcaacctccgctcctgagttcaagcgattccccctgcctcagcctcctgagtagttgggatgacaggcacctgccaccaggcccccataatttttgtatttttagtagagatggggtttcaccatgttgg

SEQ ID NO: 1444 - DNA, 401 bp, Homo sapiens
agtgtttaactcatcaatttcagatacacagtaaaagaatgtatatgagaattggtcaaggacattctgaggctttaagcttcaagtcaagaaaaacaactgcctttctgaaaacttacaccgctcacagagtctggtgggctatgaatttgatggtacaacttctaacttgacagtgtggagatcaagggtataggaawggtaaaaagctttgaaaagtttgagagtggagtttgcacagctggacacagggcaccacaaacacaggtggtgcatttgtgcctttggtggacaaagtatcacccacaatgcacaggcgcttccctggctggacaataggtctctctctccatcccctctctctctgtttcaagagaagacattttacgtaggaccttcca

SEQ ID NO: 1445 - DNA, 404 bp, Homo sapiens
ttgactctaaatcttcatttgtccttgttgtcttcaatgtcgaggccaatctctttcccctaccataatatctctattgaaatagtcctgaacaaagtcttccttgccattttcacacgtgccagaataatgcttgcctccctgcctgcctgccttccttccttccttccttccttmcttmcttccttccttccttccttccttmtttcyttccacagaatctcgctctgtcacccaggctagagtgcagcggtataatcaaggctcacagcagcctsggccttccaggctcawgtgatcctcccagctcagcctcccgagtagctgggaccacaggcacatatcagcacgcttggctaattcttttttgccttttgtttgtttgtttgtttgtagagacaaag

SEQ ID NO: 1446 - DNA, 402 bp, Homo sapiens
ccagcctggccaacgtggtaaagccctgtctytgctaaaaatacaaaaattagccgggcgtggtggctgatgcctgtaatcccagctactcagaaggctgaggcaggagaatcacttgaacccgggaggcagaacttgcagtgagccagattgcaccattgcactccagcttggggcagaaagaagagaaactcagtytccacaaaaaaaaaaaaaaaaaaaaaaagagaaaagaaagaaaagaaaagatgaacatgtaacttacacaaaacacttgttgccatttaccatggggatataatgaactaacattcagaagtcacacatatgctgaagaagcatcaggatctacttcaaaagttaaaaacattaaaaaaaaacacagaaaaaaagagtgcatct

SEQ ID NO: 1447 - DNA, 405 bp, Homo sapiens
tgctaaaaatacaaaaattagccgggcgtggtggctgatgcctgtaatcccagctactcagaaggctgaggcaggagaatcacttgaacccgggaggcagaacttgcagtgagccagattgcaccattgcactccagcttggggcagaaagaagagaaactcagtytccaaaaaaaaaaaaaaaaaaaaaaagagaaaagaaagaaaagaaaagatgaacatgtaacttacacaaaacacttgttgccatttaccatggggatataatgaactaacattcagaagtcacacatatgctgaagaagcatcaggatctacttcaaaagttaaaaacattaaaaaaaaacacagaaaaaaagagtgcatcttaaaatgacttaacacacacaactgcagaaggtggag

SEQ ID NO: 1448 - DNA, 402 bp, Homo sapiens
ccttgatgcaaatcaaaagactagatgtagctaattagacatgggaaaagggtggttctcctgaaaatctggggcctcaggcattttctggaatgtgtacagtcagaacgtgcaagttagtcagcaaagagaaaacaagcagccacacctctcccaaataccgaatagtcatccttcttttgtggttcagaggtgtttgtttgtcttakaatgctgcaacttaaaaccaattgattttaaataaaaatggtaacattataaagtgtgaaagtgtggggttaggaatcatttcccaccctgtgaaaatggctctatggtcacccgggtgtgtgtgtgtgtgtgtgtgtgtgtgtgtgtgtttgtgtgtttaacctgtgagataagaatggtcaaccagttgac

SEQ ID NO: 1449 - DNA, 401 bp, Homo sapiens
ttttctctatttcatggataatccatgcagtgtttgctcaacctgtttacactgagatgtgttgaggaactgtcccacggcaagaccacaaggtggggcagtaatgagtaattggaagaaaactgcggtaccttctaaagctcaaatgtggctttctagaacmcgatgaagtggagccctacattcattatttgaccttggttgttttttttttttttttttttttttgagacagaggagtctcactgtctcccagactggagtgcaatggcatgatctcggctcactgcatcctccgcctcctgggctcaagcgattctccagcctcagcctcctgagtagctgggactacaggcgcaagccaccatgcccagctaattttttttttttttttttttttt

SEQ ID NO: 1450 - DNA, 401 bp, Homo sapiens
ctctatttcatggataatccatgcagtgtttgctcaacctgtttacactgagatgtgttgaggaactgtcccacggcaagaccacaaggtggggcagtaatgagtaattggaagaaaactgcggtaccttctaaagctcaaatgtggctttctagaacmcgatgaagtggagccctacattcattatttgaccttggttgttttttttttttttttttttttttgagacagaggagtctcactgtctcccagactggagtgcaatggcatgatctcggctcactgcatcctccgcctcctgggctcaagcgattctccagcctcagcctcctgagtagctgggactacaggcgcaagccaccatgcccagctaattttttttttttttttttttttttttt

SEQ ID NO: 1451 - DNA, 405 bp, Homo sapiens
tgttttttttttttttttttttttttgagacagaggagtctcactgtctcccagactggagtgcaatggcatgatctcggctcactgcatcctccgcctcctgggctcaagcgattctccagcctcagcctcctgagtagctgggactacaggcgcaagccaccatgcccagctaatttttttttttttttttttttttttttttaggagagacgggatttcaccatgttggccaggatggtctgaaactccggacctcaagtgatccacctgcctcggcctcccaaagtgctgggattacaggcatgagccaccatgcctagccctgtgactttttctcaagggcttcaaacagtccctctgcaagttaacctaggcatactcacagagcaagaaggcattcat

SEQ ID NO: 1452 - DNA, 405 bp, Homo sapiens
cttctccttttcatacaggttattgtttataagagcaatgtgatgaaagcttcctctgctaagactgcaactccagcgttaccttttctttacctcaccttgatcctcggtgtgaaacttcactcattactgatgcattgcaattaacagatctcctctttcaagacacattagggtatgttctgactatcagctccaaaaaaataaaataaaataaaataaaataaaacacattaggaaatttaaatgaattagtgtaatcagctgagatagtacttgaaagggaccgtgtaggcttgtggtggaataggtactttcagacagaagtctctagaatattcctgaggaagtattttctcctgcccttcaatgaatagagtggtaaggtttgtgaaaagcaggcct

SEQ ID NO: 1453 - DNA, 405 bp, Homo sapiens
ctaagtgatttacaaatgattattcttctgaccctcatcacaattctatgagagcagtctattattttcaccaatttatagaaaaggaaactgaagcatagagaattgaatacattttctttgatgtcatagcaagtaagaaaaaaggctaggattctaatccagggagtctggctccacaacaggtgcaattaaccaccagaccgtgaggcctctctgtcatatgcaagctcgtctgttttgctcagaagactgtgttttactcactcactcccaacttcttatggtaaaaattgctttttaatgatttaaataatacatgcccatgtaaaagttaaatcaatgactaaagcattctgaagaaaggaaaggttacctggaatcccatgaccctgaaataaccat

SEQ ID NO: 1454 - DNA, 405 bp, Homo sapiens
catcagacttcagaggaattcagacttaaaattcatgtgcctttgaatggggaccacatacatgtcacatcacactaacactaatgtttcattgattcattctatcccttcccaggaatcaaattctgattaagagaaagaccctaagtggctgaaggaacaaaaagagttattgcaaaaaaaaaaaaaaaaaaaaaaaaaaaaagctgatgcagttaggaaagggaagcctgagctattaagaaaaacacattgcttcttacatagtagtgctaaaggccaagcctgcatatccctgcaatctataaagtctgttttctctgacagtgtcagagttggaaagatcaataggtgtcactcacaccattcatcatctcagaaatgagaagatttaggaaaggagat

SEQ ID NO: 1455 - DNA, 409 bp, Homo sapiens
tactccaactactgatatatcaaagtgtctgttcttgtatcattatcaaaattttaatatttaattatctgatgagtgaaaaatgacatctgatagtcctgtcagttagtattgcttttaatgtgactaatttttagcttttattcatgtttaaatgaataaaatgtactccctttactacttttttttttttttttttttttttttttgagacagggtctcaccctgttgcccaggctagagtgcagtggcgtgatcatggcccactgctgccttgacctccagggctcaagcaatctgcccacatctgcctcctgcctgtgttgctcagactggtcttgaactcctgagctcawgcagtctacctgccttagcttcgtaaagtgctggaattacaggcgagagccaa

SEQ ID NO: 1456 - DNA, 414 bp, Homo sapiens
ttaacataatgacatccagttccattcatgttgatgcatataacagatttcattctttttatggctgaatagtaatccattgtatgtatatacacatataacgtctgtatatataatgtgtatataaaatgtatatccataatatatgtatatatacacatatatgtaatatatatwgtgtgtgtgtgtgtgtgtgtgtgtatatatatatatatatatatatatatatatatatatctcacttttttttttgagacagagtcttgctgtgttgcccaggctggagtgcagtggtgcaatctcagctaactgcaacctccacctctcggttcaagggattctcatgcctcagtctcccaaaaagctgggactacagtcatgtgccaccatatccggctaatttttgcatttttt

SEQ ID NO: 1457 - DNA, 406 bp, Homo sapiens
tgtggagcttccccagcccgctcagkctgcccccagtcttcccatttttagaaaaattaaaactatggtttgttaaagcttctattctgatggtctctgttacttgtagctgaacgcaatgaattgtgagatacgatttaccacaatttttttctttctttctttcttttttcttcttcttcattttttttttttttttwttttttaaagggttgtgccatgtcacccaggctggagtgcaattgtgcgatcatgactgactgtggtgtcaacctcccaggctcaagcaatcctcccacctcagtctcctaagtagctgtgactataggcatgtgccaccatgccaggctaatttttgtattttttgtagagatggggtcttgctgtgttgcacaggctggtctca

SEQ ID NO: 1458 - DNA, 449 bp, Homo sapiens
tgcatctgtattgccatcaccctagttctggccatcctcactgaccacctgactttctgcctaaatggtctcctactttctggtcttgtatactttcaaccctttctctgcaatcagagtgatattgcttccartgttgtacagacaattcttacaaggtcctgcagcttttctttcagtctttctttcttttttttttttttwttttgaaatggagtctcactctgtcacccaggttggagtgcagtgggcgcgatctcagctcactgcaacctctgcctcccaggtttaaacgattttcgttcctcagccttccaataactggggttacaggtgcatgccaccatgcccagccaatttttgtatttttagtagaaagagggtttcaccatgttggccaaactggtctcaaactcctgacttcaagtgatctgtccaccttggcctcc

SEQ ID NO: 1459 - DNA, 402 bp, Homo sapiens
accagcctgggcaagatggtgaaacgccgtctctactaaaaatataaaaattagccaggcacagtggcaggtgcctgtaatcgcagctacttgggaagctgaggcagagaattgcttgaacctggaaggcagaaaagttgcagtgagccgagatcatgccactgcactccagcctgggcgacagagcgacactctgtctyaaaaaaaaaaaaaaaaaaaagaaagaaaaaagaaatgagcaagcactgaacacctactgtgtgcaaggcacttgatagccttcctgttatttcttcctcactacaatcccatgaagtagttcttatccccattttacaagatacaaaaattgactctcaaaaagcttaagaaatttgcttctagttgcacagtcttatagat

SEQ ID NO: 1460 - DNA, 402 bp, Homo sapiens
ctggttttcagactagaatttataccattggctctcctggttctcaggccttcagatttagactgaaactacactatcagcattcctgagtctccaaattgctgactgcagatcttatgactttccagtcattccattccttgtcataactctctttctctttctttctctctctctcctctctctctctctctctctctctacatatatatatatatatatatatatayatacatatatatatatatatatatatgaacagatacatcctattggttctgtttctctggagaaccctgactaatatacagttatgtgtcacttaacaataggatataytccaaaaatgtgtcattaggcaatttcatgatttgtgaatatcatagaatattcttacacaaa

SEQ ID NO: 1461 - DNA, 402 bp, Homo sapiens
tctcctggttctcaggccttcagatttagactgaaactacactatcagcattcctgagtctccaaattgctgactgcagatcttatgactttccagtcattccattccttgtcataactctctttctctttctttctctctctctcctctctctctctctctctctctctacatatatatatatatatatatatatayatacatatatatatatatatatatatgaacagatacatcctattggttctgtttctctggagaaccctgactaatatacagttatgtgtcacttaacaataggatataytccaaaaatgtgtcattaggcaatttcatgatttgtgaatatcatagaatattcttacacaaacctggatggtttgctgcacacctaacctgatg

SEQ ID NO: 1462 - DNA, 403 bp, Homo sapiens
tgaatgctaatggtattcttctagtctagtgcattcaattaaaatataacgtgtgttacatatgaagttaaaaatgtttagtaaccaaattaaaaaggtaaagagaaataagtgaagttaattttaataatatattatctttaacctcttttaataatatactctctttaactctttaatatatttaataatatattctcttttatatacatagaacattgtcatttcaacatgtaatcaatataaaaaatatcaattagatattttacattctttttttcacattaagtctttgaaatttagcacgtattttacacttacagtacatcttaatttggactagatgcatttcaggttcccaatagccatatgtgtctattggcgttcgtatcatatttatcat

SEQ ID NO: 1463 - DNA, 407 bp, Homo sapiens
tgtgtttttattattttttctgataataaagattaatgcagatacatgaaaaaaacaaaacataaaaagtaggaacagaaagtcaaatactgcatcttctcacttataaataggagctaaataatgtgtacagacaggcataacagaacggaacaatagacactggagacttggaagggtgggtgagtgagcagggttgagggatgaaaaattaccttagaggtacagtgtacattatgtggatgatgatttcactaaaaccccagacctcatcactatgcaatatatccacataacagaactgcacttatacccataaacttatatttaagaaaagaaatagaaaaaagataatttttttaaagtagaaagagggaaaaaagtaaagcatcatcccaatttctttc

SEQ ID NO: 1464 - DNA, 404 bp, Homo sapiens
gaaccactaaagtctagagcacataggctagaggctagaataagtgagaaatagctaatcctaggaagataaattggggcttaattgtaaaaacctttgcatgctatactaagaagctttgagttcattctcttggcaactatgagccattacatgtttcaaaagatagatctgatggaaaaacagaagtatagagggtaggtaatattctaatgtgtaaacttctactgtgagtccaaaagaatatggtatctatctctgaaccatgttcaatattttgcttagactgttcgaactatgtaagaataagaaatactaaagtgttttttctctgatataatatttaaataccttttagctatcaattccttctaatttccctttaataagacatttactacaaa

SEQ ID NO: 1465 - DNA, 401 bp, Homo sapiens
tttttgacatgtattatttgatgaaaccctatgagattaggtctttacttccgaaagaagaaaaccaaattcaagggcaattaaaaacttgtcaaatgtctcaattttagtaagaaaaaaaaccgacattggcctagatcttaatctgtgcccagtcctcttcccatccctctttttttttttttttttttttttttggkgggctgctctcaaatttttgggctcaaatgaacctcctaccttggcctcccaacgtgctgagattacaggcatgagccaccgtgcctggccagctaaggttaatttagtattgaaraaatatttttgttatgaatttagtgtagccaagtgtgcagtgtttaraccatctacagtaatgcacattaatggcctaggccttc

SEQ ID NO: 1466 - DNA, 402 bp, Homo sapiens
ctgaggaactcaatcaacaggattgcaacatgctttttttaaacctcttgaaagatcacatcactacagaataaggaaacctatttatttatttaatttgagacagtctctctctgtcacccaagctggagtgcagtggaatgatctcagctcactgcggcctccaccccagttcaagcaatttcatgctcagcctctgaatgtaagctgggactacaggggcacaccaccacgcccagctaatttttttgtatttttagcagagacaggttttcaccatggtggccacgatggtctggaactcttgacttcaagtgatctacccacttggtctcctgagggaaatctatttatgactaatgctgttctttttactaattgtttcattggctgtcagccctt

SEQ ID NO: 1467 - DNA, 401 bp, Homo sapiens
ggaactcaatcaacaggattgcaacatgctttttttaaacctcttgaaagatcacatcactacagaataaggaaacctatttatttatttaatttgagacagtctctctctgtcacccaagctggagtgcagtggaatgatctcagctcactgcggcctccaccccagttcaagcaatttcatgctcagcctctgaatgtaagctgggactacaggggcacaccaccacgcccagctaatttttttgtatttttagcagagacaggttttcaccatggtggccacgatggtctggaactcttgacttcaagtgatctacccacttggtctcctgagggaaatctatttatgactaatgctgttctttttactaattgtttcattggctgtcagcccttaga

SEQ ID NO: 1468 - DNA, 405 bp, Homo sapiens
ttctttctgaaggggttctgtcactaacaggttgcattacttgtacaaccattatatctgaatcttcccagaccgtggtttttttttgtttgtttgttttgttttttattaaatactgtcattaaaccagaactcatggatatctatgtcatttccagctataaaattctagaaacttggggattttacctttttgtttcttattttattttcttttttatcaaaagccttatcacaggtaaaatggtaatctaagcaagaataagctctgtcatgatttatgaagcatggaaattcagctgtggccaggcacagtggctcacatctgtaatcccggcactttgggaggccgaggtgggtggatcacttgaggccaggagttcgagaccagcctggcccacatgg

SEQ ID NO: 1469 - DNA, 404 bp, Homo sapiens
ctttaacatttctctgaataacgtgaaccttccttatttccttaaaatataaacttatatatgttcttcctaggagattttcaacttttctgttctccacttattactctattcactctgttctctatctgagctgtcactaattagtatctacttaaataaatatttgagcaatttaacattacagtttttttttttttttttcagcaagaagtgtgttcattatccattaaaagcctgggagagggactactaatgttacaccatcaatatctatttttagccacttcggttttggaagtgtctcttcttttggaagtgggagaccaagtggaggggaagaacatgaacaagggattgaagccattgagaaagtcatttattcattcgatagatatcttctg

SEQ ID NO: 1470 - DNA, 403 bp, Homo sapiens
ttgaaataaaactgactatggtaagaagagtttttctgggagttgggaaactgattccattagaaggcagatggtgatagtctcacagcacactctctcccatgcggtctctattctacaggcatgcagatatttccaaaagcatcccttccctccagggtcctgaagaccctacctctggttctgccttggactgctcttctcagtgatattccctttttttttttttttttggacggagtctcactctgccgccaggctggagggcagtggcaccatcttggctcactgcaacctccgcctcccaggttcaagtgattctcctgcctcagcctcccaagtagctgggactacaggcacgtgccaccacgcctagctaatttttgtgtgtgtgtgtgttttt

SEQ ID NO: 1471 - DNA, 401 bp, Homo sapiens
gactatggtaagaagagtttttctgggagttgggaaactgattccattagaaggcagatggtgatagtctcacagcacactctctcccatgcggtctctattctacaggcatgcagatatttccaaaagcatcccttccctccagggtcctgaagaccctacctctggttctgccttggactgctctcagtgatattccctttttttttttttttttggacggagtctcactctgccgccaggctggagggcagtggcaccatcttggctcactgcaacctccgcctcccaggttcaagtgattctcctgcctcagcctcccaagtagctgggactacaggcacgtgccaccacgcctagctaatttttgtgtgtgtgtgtgttttttttagtagaggtgg

SEQ ID NO: 1472 - DNA, 403 bp, Homo sapiens
actgctctcagtgatattccctttttttttttttttttggacggagtctcactctgccgccaggctggagggcagtggcaccatcttggctcactgcaacctccgcctcccaggttcaagtgattctcctgcctcagcctcccaagtagctgggactacaggcacgtgccaccacgcctagctaatttttgtgtgtgtgttttttttttttagtagaggtggggtttcaccatgttggccgggatggtctcgaactattaaccttgtgatctgcccacctcggcctcccaaagtgctgggattacaggcgtgagccactgtgcccggccgatattcctgtttttatggttgcaattgtatgctatggcaccggtactatgtgggaagaatgatgctaggtact

SEQ ID NO: 1473 - DNA, 408 bp, Homo sapiens
agaccatcctggccaacatggtgaaaccccarctctactaaaaatacaaaaattagctgggtgtggtggggcatgcctgtagtctcagctacttgggaggctgaggtaggagattcacttgaagccgggaggtggaggttgcagtgacctgagatcacgccactgcactccagcctggtgacagagagagactctgtctcaaaaaaaaaaaaaaaaaaaaaaaaagtgcctactcataccctcctcctatttattctgatttctgtgcatgtattctttttgtttgtttgtttttcagagacaaggtcttgctctgtcacctaggctggagtgcagtggcacagtggcatgaccatagctcactacagcctcaaactactcctgggctcaaaatgatccccctgcctc

SEQ ID NO: 1474 - DNA, 403 bp, Homo sapiens
cccatttctaaaaaataatatcttttaaaaaattaactgggcatgkcggtgcgtgcctgtagtctcacctacttgggaaactaaggagggaggattgcttaagcccaggatgtcaagattgcggtgagctatgattgagccactgcactccagcctggaggacagagtaagaccctgtctcaaaataaaataaaataaaataaaattagaaaggataggtgtgtktgggagggagactggttaaycagggtgcatgggattatgtagggcttgtctttcatttgagttcttctctgtctttttaaaatgactgattatatatattaggtcccaatggcttcattatcactattattttaattcataggttaaattttataaacatgaaaaataattgacaagc

SEQ ID NO: 1475 - DNA, 405 bp, Homo sapiens
aggcctcaggaaacttacaatcatggcagaaggagaagcaaacacatccttcttcacatggcggctgcaaggagaagtgctgagcaaaaaggggaaaagccccttataaaaccatcagatcctgtgagaactcactcactatcgtgagaactcacttactatcatgagaacagcatgagggtaacagcccccatcgttcagttcaattacctccgaccaggtcccttccatgacacatggggattatggggactacaattcaagatgagatttgggtggggacacagccaaaccatatcagaaggtaaggcctattttagtaagttttgtttatgcaaactcatctcagtgttgactccctatctttataacatgggtcacttttttcttcctgatggtgtgggg

SEQ ID NO: 1476 - DNA, 410 bp, Homo sapiens
catgcccaaataatttttatattcttagtagagatggagtctyaccatgttggcaacgctagtctcgaactcctgacctcaaacgatttacccacttcagcctcccaaagtgctgggatcacaggtatgagccaccgtgcctggcctatacttgtgtatactttgaattgtttcttttttcttttcctattttattttattttattttatattttattttattttattttttgygacagggtctggctctgtcacccaggctggagtacagtggtgcaatcatgactcactgcagcctcaagctcctgtgctcaggtgatcagcctcctaggtagctgggactacaggtgaccaccatcacacccagctaatttttgtattttttcatagagatgaggtttcaccatgtt

SEQ ID NO: 1477 - DNA, 408 bp, Homo sapiens
tgttccaattcatggagcaaccagacatacatgttcaaayaattatgaaaaacatacaacagatatttatcaacaaatacatcagtaaacaaacttacatgaccctgcttggccatcactgtttcttttcaacacacacacacacatttacaaatacatatatatgtgtgtgtgtgtgtctgtctgtcgatatatatgtgtatatatatatatatatatatatatatatatatatatataaataaaataaataggtaagagctgcttatagccctgaatccccacagaaaaccccgtctgtctttagtttcatgaaagcattgtactttttctcattatttttcagaccatcacagacacttctgatcagtgttccacttaagcttagccccaaatacacagaggaat

SEQ ID NO: 1478 - DNA, 404 bp, Homo sapiens
attcccaagggtttttcatttcactgtacggacaaagactagaatctgccattaagttgtttagttcttaaactgaataaagacatgagttcatatactattcacatgaagagtgattgactagcagtgagtgaagttaatcctcatcatctcaaagctgattgtaatctttactgcagtgaattttatcgtgtgtatgcgtgtgtgtgtgtgtgtgtgtgtgtgtagacattcaaagggtgtttctgaataatataactagtatcttataatcatagaattttatatgctgaacatttttagagattatttgtgtcacttcctaagtgagaaaaggcaggtctggaaaagtgaagtgacttgcccagtgtcactacaaccaatcagtagcagtgctgagacta

SEQ ID NO: 1479 - DNA, 400 bp, Homo sapiens
ctctgggctgttctgcattagagagaactcaagagccctggaaattataatttcagaagtattgataatattaaacaacatcaaaaatttttaccacttttgcctgcccttcttacttttttcacaagttaattgaagatggaaggcagtaaagcctcgtgattctttttcaaaaaggttaaaawacaatataatcyatcttttttttttttttttttttttgacacagagtcgtgctcttgttgcccaggctggagtgcaatggcgcaatcttgactcaytacaacctccgcctcccaggctcaagcaattctcctgcctcagcctccaagtagctgggattacaggcgtgcgccaccgcacccagctaagttttgtgtttttagtagagacggggttt

SEQ ID NO: 1480 - DNA, 402 bp, Homo sapiens
tattaggggctraataccaacaacataagtcagaaaagggtttacattgacccctttggattctaaatattgtaataaatattattagttccgaaatatcatatctgtttgatttcccaaatgattgcagaaawgcttygatctttttagtcctatratattgtagagatatctcactaaygatgttttttttttttttktaagatrgagtctcgctgtgtcgctcaggctrgagtgcartgagccatgtttrtgccactgcactgtagcctgggtgacagagcgagaccctgtctacaaaaaaaaaagaaaagaaaagaaaagaaaaaaagaaatgtaattcactttcttctggtcagcagctgacaggatagaacacattggactagaaacctgttgtat

SEQ ID NO: 1481 - DNA, 401 bp, Homo sapiens
taggcaaacaagaaagaatgcatacagttttatcartttatctgagattttgtgataagctacagaccaagtcaaatggactagttttggcaggggcttgctgtccatatgatggtcagttagcttttttctgagttaaacttgaaaactaagaactttaagaagtgcatgggtatatataggtgtgtgtgtgtgtgtgtgtttgtgtgtmattttacaagactgtagaattataaaatgacatttgttttaaggaatatttgattgacagtttcacttaccaacgttagcctctaattatgacactgaggatacccaaatttaaaaatttcctttataatggtccctgagacctggtgattgaggtcataaaaaaggaatggtagttttctttcagaatt

SEQ ID NO: 1482 - DNA, 401 bp, Homo sapiens
gcaaacaagaaagaatgcatacagttttatcartttatctgagattttgtgataagctacagaccaagtcaaatggactagttttggcaggggcttgctgtccatatgatggtcagttagcttttttctgagttaaacttgaaaactaagaactttaagaagtgcatgggtatatataggtgtgtgtgtgtgtgtgtgtttgtgtgtmattttacaagactgtagaattataaaatgacatttgttttaaggaatatttgattgacagtttcacttaccaacgttagcctctaattatgacactgaggatacccaaatttaaaaatttcctttataatggtccctgagacctggtgattgaggtcataaaaaaggaatggtagttttctttcagaatttta

SEQ ID NO: 1483 - DNA, 401 bp, Homo sapiens
gttcagagttcctctgcaggactgcgtggtgacagcacaccacaggtggcccattcagcactgtcatctgggacagcaaggataccctgctccatttgtcatcctatggaattctgtcagcagttgaaagcctttcagcacaaaacctttaacattcgaggcaaacttcctaattttttttttttttttttttttttttttgaracagagtttctctctgtcacccaggcttsagtgcggcagtgcaatctcggctcactgcaaccaccacctcccaggttcaagcgattctcctgcctcaacctcctgagtagttgggattacaggggcacgccaccatgcttagctaatttttgtatttttagtaragacggggtttcaccatgttggtcaggctggtc

SEQ ID NO: 1484 - DNA, 416 bp, Homo sapiens
gcactagtttaaacaattatttatttatgttaccatttctttatgttagtttcaaaagtaacttagaataaaatagttactgttatttgtttaaatatttattttgagatataacaactcaactataggataaatatgtgtttgtatatatatatgtgtgtgcgtgtatatacatatatatataaaacttaaggcaaaacatatatatatatatatatatatatatatatatatatataaaacttaataacttaaggcaaaactgggaagtttggatagatgttcgtggcttcctgaagttttgaacatcattcctaaaagacccaattcacattgtacataattatataaaccaaaccatgtatttgtcctattgtgaactggacacatataacttctgatcctggagctttcaa

SEQ ID NO: 1485 - DNA, 402 bp, Homo sapiens
tgaaaacgtgattttaaaaaaaatgagatttatccgtaaacgagggctaggctacagttggtagggcggctgtcaattcttctacggagttttaacctacactcaatggatgcatgaaaaaaagaaatgaaatgatttttttagctactttaaaaaataaaggtaatgaatatttcttatctatatgcatatatatatatatttcattataattgttgcttctgcagaaaattgggatagaaatctcagatgagctgtagttacacggagatctacagcaatgcaatgtttagctagcatgcattttgtcatccaaggctagtaggtgaaatatttcctttacctgtcttgatgcacggtggagaaakgagacccgcttcgttttccctctaatctagagag

SEQ ID NO: 1486 - DNA, 401 bp, Homo sapiens
ctttctctgctaatagatctataaaatgtggaaagagatgttttacaatctctcatagcaatcctattttttgttttacataatttgatgcttttatatgaaacataaagtttcatggctattataaattttatgtagattttgcctttcatgaatataaaatgaccttcttttctatggaaaccttttttttttttttttwaccttatattaaattttgtttgaaatcaaaggggccatcctttctgtttttaaaatttcatttgtctggtaagcctttgcttattctttcaaaacatttctcattttaatgtgtctctttaagcttaaatagcgtatgtctagatttttaaaatctttttttaaatggggagttgaaataacttaaatgtattatcata

SEQ ID NO: 1487 - DNA, 400 bp, Homo sapiens
tcagaaaagggtgtatctgtttttgcattctgcttggtgggagaaagaggaccaatttttgaacatgaaaataagtagataagaatctgtgccctgggctcaccatttctactgggtgttgacagttgcctgaagcacaactttgtctctctgacccagtgttttgccactctcctccacctgaagaagatttttttttttctattgcttggctcttgggcaggttgaggagagaagagaggagatgaaggatgtgtaggttgctcctgctgtaaagatcygccctattttgcctggcccctgtcctatttctagtttctgctaccttcagacatgaggttactggtgcttctcctgtcttttgtagtttcgactctcttaagtgcatttgggctgtggt

SEQ ID NO: 1488 - DNA, 401 bp, Homo sapiens
  misc_feature (1)...(401): n = A,T,C or G
ngtaggtgaattaaaattctagagtaacaacatgaaaaggatgcagtaagggtccattgcttagtaaagtcatacactgtctcaatttaactgcattaatactggatacaacagtagctggaacaagttgtaaataattatctactacctagctttgaaagagagcacattttacattcttatggaaacttttttttttttaatgatgaaacaaccaattctgtagcatatagaaaatgcataatgtcctgcaaaaataactgtgtagtggaaaattatctctttcagatattcatcacttactgttcactgattttcatgctgagaggttcatgcttagactactcttcaaacaagtttatctgggttgaagttttttgcctcgctccctttggacggga

SEQ ID NO: 1489 - DNA, 403 bp, Homo sapiens
cttcctctccatctcctcactgcttacataggagctcagcttcctcttaaaatccctttcagagaaccctggaaattttcaggatgttttgctcaggaaaaaggctgctcatgttgtactaattctggcttctcatttccgtctcttagttctgcttctgtgggagctgccctccctgaaaatgtgtgtttctgtagtggggtacgatccactgacgttcctgaaggaagagcagttctttaggtgcctgacttggtgaggactttgtcattgatgccttaaagcatcaatgrtcatgatgagagccttacgtagtctttcatgaagtcagctccttcacctgtcaccatcccatttttccctccacaggtgtcaygtagggaggagagaaggaaattccttg

SEQ ID NO: 1490 - DNA, 402 bp, Homo sapiens
ataaaattttcattctcacaatgagaatagtctttcattctctatgaattctccaaataatttagtgattaagaaaacagatctattttcttaatatttcataarccttttggttacatactaaaacaatgtattaatattcttatacggtaatcatatttgagttggttcattagactttattttaacattatgagtaatttttttttttattagaaagtcttttgaattgtagggcataaggaatttttagttgtgactcctaggtctaacatttaaaaaaattcaaaacacactgtcttagcaatgttactagaattaatcaaacgctaaaattttgtaagcctgactccatagaccataaaatattggaaagatcacttgctatgaagtcaataaact

SEQ ID NO: 1491 - DNA, 400 bp, Homo sapiens
tgagcacctgaccgctatttatcaaacattgttctaggggatgtggggaattgtaagagaagctcaagacagtgttcttgtctgggctgatgaaaccttatcctaattcaggctacagtgaatactttatgtgcaytctgagtgttcctatcctttccttgttatatggcaggagtttttgatatagggtacatggacccacaggaggcccttggatagaacacaagtggtaaaattccatcttttaaataattaactactaactgaaatttagccatttcttcaattatatatgttggcacaaaccacagtagtattaagagtgtctctgaccttgtcagcagtagaaaacactgatatttttatataatatcacagttgttgcagatatcttgraaca

SEQ ID NO: 1492 - DNA, 403 bp, Homo sapiens
gaaatgtgtggaatgtaagaaaaacagtgttaagacagaagtttacagttataaatgcttacattaaaaaatgcaaataaataacctgaatgtatacatatgtaactaacctgcacgttgtgcacatgtatcctaaaacttaaggtataattaaaaaaaagaaaaataaataaatattaaaattcaaaaaaaaaaaaaaaaaagagaaaaaggaaaatagagagggaaaaagctaagatggctgactagatgcagccaggaaacatctatcccacaaagagaactcaaaatattgagtaaatcatcagacttcatacagatcttttgagagaaaacacttaaaatcaataaacacagagacactgaggttgaagagggaggaagctgggaagcctgcacagag

SEQ ID NO: 1493 - DNA, 404 bp, Homo sapiens
  misc_feature (1)...(404): n = A,T,C or G
nntttcaaaaatctaaaaatggaattaccatatgatccaacaakcccactaccaaatatttatccaaaggaaaagaaatcagtatgtcaaagacatacctgcacttggacgtttattgcagcactattcataacagcaaaggtatggggtcaacctaaatgtccatcattgaatggatggataaagaaaatttggtatgtacacacacacacacacacacacacacacacacacacacatacacagtggaatactatctagccacagaaaagaatgaaattatgtcatttgcagcaacatggatgaattaataaagtgaaaagacaaaaaaggaaagaaaaacctatcctaaaatttatatggaatcttataggatctgaataatcaaaataatcttgaaaagg

SEQ ID NO: 1494 - DNA, 401 bp, Homo sapiens
  misc_feature (1)...(401): n = A,T,C or G
ngctgccatgtaagacatgacttgactcctcctttggtttccggcatgattgtgaggccttctcagccatgtggaactatgaatccactaaacctctttttctttataaattacccagtcttgggtatgcctttattagcagcgtgaaaatggaataatacaggtggtaaatttcatgttatgtgcattttaccacaattaaaaataataaaaagatgatcatgggcttctagttcaattattccatttcttctccaaattataatcttaccaaaggaaaaaaaaacaaatgagatttaaactgccaagaacaagggcaaggtgagggtctttgggccttataattgatgaatatcttgccaaagtaacattacttagagtttcaaattgctgaacgatga

SEQ ID NO: 1495 - DNA, 402 bp, Homo sapiens
  misc_feature (1)...(402): n = A,T,C or G
ngagatacataattttttttcttagatttaataatgtggattataataccaatrggttatctaatattggaccaactttgcattctgaaagaaattccacttagttgtgttgtattgatttcacaatgtataagattctgtttgctaatgttttagttggtatttttacatcaatatccataaacatactgctctgtaggtttttttttgtatttttaaaaatttagatttaggtattagtgtagtacttgcttcttaaaaattgggaactttttattcatctttaatgttctgcagcactctataaaacattggaaatatcaaatctttgatgattcggtagaatttttttccaaagttatctgggcaaggtgctttttkgttgatgtttttcttaataac

SEQ ID NO: 1496 - DNA, 402 bp, Homo sapiens
  misc_feature (1)...(402): n = A,T,C or G
natggctccattttttcactgctccctatattcatgtcttttgccatcttactttgcagtgttcctccattctgacacagtacatggccacgtaacttgctttttcctaggaggaagtagaagtggcagtgtgctaatacaaacctaagcctcagaatgtcttatatatttgctttttgttgttggctttagtttttttttggctgtttcatttctgcacttcagcctgctgggaactgggaaatagaaggaatatagccaagccatcaagatcatccaagctgaggccagcatcaaggagctggaagcctataaatgcagatatatgagcgagctctgctaacatcagtagtgctcccaactgactactccagacgtcgttagaacttactgctgtgtact

SEQ ID NO: 1497 - DNA, 402 bp, Homo sapiens
tgctaagttcagactgttcagtcaattgattatactgagagagattatgcagtaaagttatttagctgackggtaaagagtctctttggggatggtgtgcccagcgcacaaggttaaggagttggaagatttcttctgtgaataaaatcaatgtttggggctcagtctatcgggaatgacttattactagtactaaaatttgtgtgtgtgagatttaataagtctttaatatggtcttcatttgttgcttcatttattcaaacatttattaattgcctctgtcttacacatagaaaaaaacctaatgctaaggctgttgtcactgcgctcaaggagaagaggaaaataacagtaatttatacctgctagtatgtgctaggaactattttaagtgtgttatgc

SEQ ID NO: 1498 - DNA, 401 bp, Homo sapiens
atgacatgggaaggagggcttgctcaataaacattgcctgttatagtgtgctggcattaccttaaaatccttaataagctgtaagttttggatgagagtcagaagtgttgggttggtgaagcattttgctacagattgcaggcttttctccggtgtcacaaggcattgaaaacgcttgttcggagacagcccagaagggaaaaaaaaaaaaaattctggaaagcctggcattttgtgctatgttgtgagtaagacatttatagttattgagccaaaatttccactgtaatagaaaaagcagttgcttttaaacttctggtccaatttagtaattatgggtgagttaaaatgtaggccatttgaattggatttggaggatcaagtaagattctgtcctacag

SEQ ID NO: 1499 - DNA, 401 bp, Homo sapiens
gcacaaattacaactcctacacagctctaccccctccacttttgagtttcaagacttttgccaaagttttctggtctttgttcacttctattattaacatctcttgtgtgaaggggaattttgaatgaatgggatgaaatcatctaaaccagcttcggtcctaaatatagtgtctggcatcaggtctgggaaaaaaaaaaattggtcaaagagatagcctgaggttatttttaggaagttggatgtttagggaaattratactatgaaagttctggcctctatctctgaagatattccattgagagatacatgcatgcattcaacatctcgtttttttccattcctgcccttygggtgttccgcgtcattcactatcttgtcattacagcattaagcagaa

SEQ ID NO: 1500 - DNA, 401 bp, Homo sapiens
gcagtgcttggctggagtaagctccatgtaaatgttagtccttgaatgaaagtagagctctggtagagatattccataaagacaaccttaaacatttttgaaccttttatgcctccaaaatatacacttccaaactcttctatcactgaccatattacttataccctaacaaggaagttattaagaatcataccagagtaacaggaataaatcatgccagtcaggaaaaggggtacattggttattctatttataacattacttgagtatttataacaacaagtaaacaaaacgttttttagaaaaagaagagattactgtgttgtacaaatattactagatgggtaatttctctcctttttttccaatgtattccagaacccccatggatatcaaaatta

SEQ ID NO: 1501 - DNA, 401 bp, Homo sapiens
atagcaccacccttatgcttactaatcccttcatctttaagacacctggataatgagctatctgcatggttggaaatagtctgggtttgttctaaattttacattagataacaggtcagcaacaaaataatgggagggggaaattagaaaacattaagtcttatttcatgtcatgtgatacagtatatatgtattttttttaataaaagaaagtgacatatattgtagttcaattggatatttacatttcatgtagaccataatggtagcggtaattatagaaatcttagcaactttcaaaggaaatttttcccagcaagatgactgacaaaatttttgaaagtaatagagagaaactgaggcataaaatttacctgaaagcagtcctgtttaaattggac

SEQ ID NO: 1502 - DNA, 401 bp, Homo sapiens
tccagacgaggtcagataaagtggattatatgggtaaacattgtggaaagtaagcttttcgaaatattgtaactggtgaaaagttgtccatcatagttaatgggctacctgagcaaatacctttcctgagctttttcttgaattcatagaaacttgggtctgaaagaaaacttacaagtcatcacttttttttttttttttgagacaaagtctcagtctgttgccaggctggagtgcagtggtgcgatctgggctcattgcaacctccgcctcctgggttcaagcgatttttctgcctcagccttctgagtacctgggactacaggtgcacgccaccatgcccagctaatttttttgtatttttagtagagatggggtttcaccacgttggccaggatggt

SEQ ID NO: 1503 - DNA, 401 bp, Homo sapiens
cacggtgaaacctgtctctactaaaaatacaaaaaattagccaggcatagtggcgggtgcctgtagtcccagctactcaggtggctgaggcaggagaatggcgtgaacccgggaggcagagcttgcagtgagctgagatcacgccactgcactccagcctaggcgacagagcgagacttggtctcaaaaaaaaaaaaaaaagaagtaattggatgaggtgatttatgtaattcctacaacctctcagtgctaacaaagcaacattcaatgacatttacaatgatcatggtggcaagttgggagagagaaagggcatttctgaagtaataataaaatgagtaaaataagatggtagtgccgtgtgttgatattgtgaactttacatttttactttctctcat

SEQ ID NO: 1504 - DNA, 401 bp, Homo sapiens
atcctaatttctgaaattattcctgaaaattcaagtccattgtttgtctcccaccctatcctttggttctgtcacctcagaactaacaccttgacaaagtgtttcttttttgtccttctaccctccccgcaaaagtttattttttaataaatcgtttctggcaccaacccaaaccacaattacttaaaaagaaaaaaaaaatagcccaggattccatttacttataaacttgctttctgaactttatttttaatttcagcatttttttttttttttttgagatggggtctcgctctgtcgccaggctggagtgcactggcgtgatctcggctcactgcaacctctgtctccctggttcaagcgattctcctgccttagcctcccaagtagctgggattaca

SEQ ID NO: 1505 - DNA, 401 bp, Homo sapiens
agtggaagagtttcaaggcaatcttccactcaggactccttatgccttgcatgcacacaaagcagcgttgctcaaaacataggaaacaactatgaggaataaaaaggaaaagcttgttccttaaagaacgagaaggaggccagcagtctttttcataccttcttgtttatagaaagcagatttttttttttttttttttttagtaaaagcatatttggagcaggaaagaaatatgacctagactgtgttgttttcttttattgtatctacaaatagtttagctgaagtgagcttttcagttattgattttaaatcataagtttaattcgtcatcaaggcaacaacaaatgtgatgtttggggcagatgcaaagttgaagtatgtctaaagaaatagcacgc

SEQ ID NO: 1506 - DNA, 401 bp, Homo sapiens
tgtttgatctttgtaaaactacatatgactctcaagttgcaagtgatactgtggttcagcttatcaaatactggaatttggcttctgtcactgactctgccactggctttgtggtcctgaacgcagccctgatgtcagatgtgttggtaatcttggggaactttaagcaagccagctttttttttttttttttttttttttaggactagatggaggtaagggaaagtgtgagacaataaaactggcaaccagaaacagaagaagaaaggaagagagaaaggaatctacggagtgtggaagttttaggagtaaatttctatataagttgcaaaattttagtaattctttagttcttatttcatttattcacttattttttttttcttttkagacagagcctc

SEQ ID NO: 1507 - DNA, 401 bp, Homo sapiens
gcattttctgtctgatttaattaagaccactacctgctgacaaggctttgagaaagaaacaaaaataaggaatgcacaaataaaatgtaatgcaggtcaggcatggtggctgatgcctaagtgggaggcttaggcaggtaatcacttgaggccagaagtttgagaccaggctgggcagcacaccaagaccatctctctacaaaaaaaaaaaaaaaaatacaaattagccatgtgtggtgatggatgtctgttgtccagctagtcaggaggctgaggtgggagaatcccttgaggccagttcaaggttacaatgagctatgatcatgccactgcactccagcctgaacaacagaatgagaccctgtctcattcaattctttaaaaatctaatgcaaaaacat

SEQ ID NO: 1508 - DNA, 402 bp, Homo sapiens
tcctttggatattagcattggaaagagtgttttttgccagccttgatggtgcacccctgcagtcccagatacttgggaggctgaggtgggaggatcacttgatcccaggggttcgaggctgcagtgagctgtgattgcaccactgcattccatcctgggcaacaaagtgagacactgtcaatcaagaaagagaaaaagaaagagagagagagagagagaattctttttccttttctttcaaggaaaaatcagaaaatgagtggttgatcttagttcaattaaagaaaacaaaacaaacctgctgggtgcctcctctgctctaaatactaagcaagaaataaagtgaataagcccctgccagtcatgtaactaaactctgaatgagggaagtagctaaaatgt

SEQ ID NO: 1509 - DNA, 400 bp, Homo sapiens
atcatagtaaagtagtaaattcatagggaatgaattaatctcctttttgttttgttttctctgaaaaagagggtgtgattacagcatatattgattgggtactgattatgggacattttcattgtatttgttgttgttgcagtagactaaatgtcgagcccgtgaatctcttgtgttggcattgtcagaaaaaagttgtatttttttttaaactggtctaaaaggaaaaaaattgaacatatatctttatattttttttgctctcttctcaaccatgtttagtgttttgtttatattcaaaggattttattttcacacttacaattctttacttgtctgtcattcaaatctttgttaccaaaacagtttgctctttttcatcattcactaagcattcctt

SEQ ID NO: 1510 - DNA, 401 bp, Homo sapiens
cttcacccactactctaaatctgatgaaacagagcagtaagaatttcttaggatatagcttaatttatttttttttaaaaagctcaatctaaaaacaagcttaatttaaaacagagacaaacaaatatgcctaactttgagttttgacaaaaaatgcaaaagtaattcaatggaggaaagatgagctttaaaaaaaaaaaagtgatactggagcaattggatatccaaaggcaaaaaaaaaaagtgcctaaattcatttctcacatcttatacagaaattaactcaaaattgattacagacttaaacataaaatgttaagcaataaaactttaggaaacaaacaggagaaaatgatgaggacctaaagctakgtgaagaacttctagacttgatactaaaa

SEQ ID NO: 1511 - DNA, 402 bp, Homo sapiens
aaaatgtactgcacaattggcgtgcaatagagtagtcaaagaaccaatgaaatgyaaaaagttatctatatggagatctcaaaatgaattaacaaattaaatcctttgacattgtatgagatcccattagggttcattgttacagttttctttaatgtttctaaaatagaaatgttgtcctgggcagagcagtgtaatgtgtacttgctttggcatcaaatgccacattttttttttttttgagacggcgtcttgctctgtcacctaggctggagtgagtgtgcagtggtgcaatcgtagctcactgtagcctcgaactcctgggcttaagcaatcctcccacctcagcmtcctgagtagctgggactacaggtcccagstgcccagctatttttaaaattt

SEQ ID NO: 1512 - DNA, 402 bp, Homo sapiens
aaaaccccgtctctactaaaaatacaaaaattagccaggcgtggtgatgagtgcctgtaatcccagctactagggaggctgaggcaggagaatcgctagaacccgggaggcagaggttgcagtgagccgagatcgtgccactgcactccagtctgggagacagagtgagactccatctcaaaaaacaacaacaacaaaaaaagtgtacatactgcatgatacaaaattctaagaaaagaaaactaatctatataaaaatttttctctgttattctctactgagaggggatgaggaggattaccaaggggcaaggaggaccttttggaggtgatagatgtgtttattactgggattgtgttgatggcttaccaggtatctatgtaagtcacaactcatcatat

SEQ ID NO: 1513 - DNA, 401 bp, Homo sapiens
tactgtaaatatgtgcaggctgggcgtggtggctcatgcctgtaataccagyactctggaaggccgaggtgggagaattaaggccaggagtttgagacatagcaagatcytgtctctagtaaataaataaataaataaataaataaataaataaataaatgcacttttttgtatattgagttatatctcaatgaagctgcttttttttaaaaaaaaaaaaaacatataacataaaagagattaacagaagagattcaaaagtctagaacaccaaatattaaaggtagcttttcaaatcagtgagaaaataatgatattacagaaaatggcaaatcatctagaattaaatttctacttcatactatcagcaatataaattgcagactaatctaaattaacaa

SEQ ID NO: 1514 - DNA, 401 bp, Homo sapiens
aggggtaattagacatcgactgtgtagtcaacattatgatcaggctatataaaatcatgaaacatcatcctaaactttaaagaactttgagtttagctgggaaaatatgctcacaggaaataattatgtaggaaaagaaggcatcaaaagggcttaaagcaaccaatcacacagagtttccttgttgggaccccccccccacccgccgggccccaccccgttgatatcctaaatgttctcttgacatcttggatttaccatagagcctagtactgtctgtaaggtcctgggcctgttctaattagtgctgagtatctgttgatctgctacgtgcaaatgggaagataaaactaaatgttagattagggtcaatctttaaaactctttcctagattgtgatg

SEQ ID NO: 1515 - DNA, 402 bp, Homo sapiens
aagtttttttcatcatgtcctgcttttacaaaccaagatctaatttgacatgattacgtaattgtgtggccatttgtgcccttccttctcctcctcctttctctaaagtagaaagcctctctttcctagagcctatgtaaaatgtgttaattcgcttaatagcaataataattttcttatgacaatttatctattcactaaagtgttattaaggacctattagttggaagcctctgtgccagctgttgggaatagaaaaatttataagacactgtctttggagctttcaatctagtgggggattcaaacaattaaagagatacttttaaaagacagtgtaataagtactctggaagatgtggcagactgccagttgccttccccagcataacattttcccaa

SEQ ID NO: 1516 - DNA, 402 bp, Homo sapiens
tcctggactatgaggtaaccttgggagtactagggaattgggatgctagtaactttctagaagcaccaactcagccccagaatgcctcctgctgacttcttttacgtgggagagtaagcatttgtgcatttaagccactatagttggatatttgaccattgcagacaaaaataagatcaaccgatagaatgccatttatgaaaaaaaaaaaaaaaaaaaaaaaccatgggagtggttctcctctctgttatgatagggagaggtcagagatgctgtccctgaagaagtgacattcacactgagacttaagggagaaatgagtgagcaaggtataggaaagtatttaaggaatatcatctgaagctctgaattagaagctatctacaagatactaaaagaaga

SEQ ID NO: 1517 - DNA, 402 bp, Homo sapiens
gaaattatgaggggttgtggracttttctatattttgatcttgaaaattatataactatatacttgtgttaatcttgtagaagtgaacactaaaaagggtgaattttattataaacaattttttaagagaacaaaaaatgtactataatcccaccagccaataacacactattaacactttggcgtacttctgactagtctttttttttttttttttttttttttgctggtgtttcaaaatgtcattatgatcatataatacacaaatatacatatatgtgtgcatatagatatctacagatgactaagatagatgattgatagatgatagatcagtgaatagataaccaaactcaaaacaaaatagttaattcatgcaacttgcacaaaaggtacaagaaa

SEQ ID NO: 1518 - DNA, 403 bp, Homo sapiens
gaaaaggacttttwtgtttgtttgtttttgagacggagtcttgctctgtcgcccaggctggactgcagtggtgcgttctcggctcactgcaagctccgtctccctggttcaagcgattctcctgcctcagcctcccgagtagctgggattacaggcgccagccacaacgcccacgcccagctaattttttttttttttttttttgtagtagagacggggtttcaccatgttggccagattggtcttgatctcctgacttcatgtgatccgcccgcctcggcctcccgaagtgctgggattacaggcgtgagccactgagcccggccgaaaaggactcttttttttttttttttacacagagtctcgctctgttgcccaggctggagtgcagtggcgccatctc

SEQ ID NO: 1519 - DNA, 401 bp, Homo sapiens
atctttttgagtgagtgttgccactttgacccaggcaaatgagaaataaaacaacaataccaaccagcagtttcaagtatccttctgctgcataataactcagcagtaggctttgctaatggtgtttatgagctgccaggctagaattggcccttaagcagggaggcatttgcccagtgggcttcttccatgtggggggggcctttttgcagcctgggggcccttttaggtgattctcagccggagcggtctcttcaggccaaagacttttgcaatgagctaactatgttcaattattgctttcagatccaccctacattcaaatgttttgggacaccaatgtaataccataaaaatgactgtgtaggacacgcctatgctaatgtcatgactggtttgtt

SEQ ID NO: 1520 - DNA, 401 bp, Homo sapiens
gaccatcctggctaacatggtgaaaacccgtctctactaaaaatacaaaaattagccrggcgtggtgtcaggcgcctgcagtcccagctactagggaggctgaggcagaagaatggcatgaacccaggaggcggagcttgcagtgagccaagatcgcaccactgcactccagcctgggcgacagagcaagactccgtatcaaaaaaaaaaaaaagaaagtttgggcaaaacctagagtttcagggaaagtcatttgaggtttggtttaggcaggaaatagaacaaaaccagtgtactaaggagaatacagtggaaataagagggaaaggaatgaagaaactggtaggctactaaaatgcccaggtacaaactactgaacatccacctttatgctgtcagtg

SEQ ID NO: 1521 - DNA, 401 bp, Homo sapiens
tcaggcgtagtgaacatacaccacgcaacctcccattcagagaattcttgtgcaaagaaggattccaaagggtttcagaaatactaaacttcttgaaattgaaattgaaattgaaatccttcttggcttctctacctgttacttcctctgcagtgctcagtatagtgtctgctctccctcctttctttttcttttttttttgagacagattttcactcttgttgcctaggctggagtgtaatggygcaatcttggctcaccgcaacctctgcctcttgggttcaagcgatactcctgcctcagcctcccaaggagctgggattatagtaccacgcccagctaattttgtcttttcagtagagatggggtttctccatgttggtcaggctggtctccaactc

SEQ ID NO: 1522 - DNA, 404 bp, Homo sapiens
aggacacaggaatattaatctggagaagcctttgataatagaatatagtcaaagttgacattgtgctagaatatttgaattttttattttccagaaattattttcactctttgctacatttactgtttgacctcaaaagaatgtaaaagcaagtttttaaatacaccattatttcctcaagaggctacagaattgctggaattttttttttttttttttggaatggagtcttgctctgccacccaggctggagtgcagtggcaygaccttggcacactgcaacctccacctcctgggttcaagcagttctcttacctcagcctcctgagtagctgagattacaggtgtgtgctcccatgcctggctaatttttgtatttttagtagaggtggggtttcgccatg

SEQ ID NO: 1523 - DNA, 402 bp, Homo sapiens
tggaattgagttatatgggagtcaattattcggtcacagcactggattaggaggttgagttcttgatagatttactttcagctgacctgtgtgacatttggtatttggttttgcaactttgttttcagttttttccatgcaccaatactcctagaattttgcttttgcctcttttcttccctttcatcttttttttttttttctgtagaaagcatacatccatatagaagacctctctcaatacattccagatctgagttgcagtgcagcacttagcttagcttgtgaaacactccraagacttgattaatatcatcctatggagagatgtccttaagtaacttagaatggatcctttatttttccagtaaataaactctaaaatatgaggatttccaaggt

SEQ ID NO: 1524 - DNA, 401 bp, Homo sapiens
caagatcacagaagagccattaacattttaaaaacagagagatcttgtagataacctaatcaaaatattttactttactcatggggaaactaagatccagaattgtgaaatgactgggtcttaaatacatgcagctagtaagaaacacgggctggtctaaaaaacaggaatgccacttcatttagggctttttttttttttcaatatcccatgctgcttcttataaattagataattctttaatggtggaagactttattttttctgttgttctatattctttattgagtgcctgctcaatagagaagagtttacctctaaaaggagaacaaacaaaagaataataaacmagaaatcatatactatcttagcaggcrtatggggaaaataagtgtgaggag

SEQ ID NO: 1525 - DNA, 401 bp, Homo sapiens
atattctgtagaatggatattattgtagccaaaaaattaatttacataggtacacagatgatgacatggtaagctttctttaattagaaaatgtttctttcatttaatatctttcatcttaagatcaaaaacaatcttgcaatattgaccttacagcactgttcttctgttatcctcattaaaataatatcaataacaataatagtaataatggccattgttgttgttatgttctctgaggcatttagctcagagaatgttgagaaaaaaacctgacaaagtacttaaatattcttgatgccatctctctcactcttcataggttgtggatataaagaactctgtttttttcattttttataagccacaaacaatgaagtaatcatttctttgttaaaaca

SEQ ID NO: 1526 - DNA, 402 bp, Homo sapiens
tcagcttagggagattttgggctgagacgatggggttttctaaatatacaatcatgtcatctgcaarcagggacaatttgacttcctcatttcctaattgaataccctttatttctttctcctgcctgattgtctctgaagatagaccaatagcaggctctgaaattgaggtaataattaatagcttacctaccaaaaawagtccaggaccagatggattcacagccaaattctaccagaggtacaaggaggagctggtaccattccttctgaaactcttccaatcaatagaaaaagagggaatcctccctaactcatttcatgaggccagtgtcatcctgataccaaagactggcagagacacaacaaaaaaagagaattttagaccaatatccctgatga

SEQ ID NO: 1527 - DNA, 401 bp, Homo sapiens
tctattgaataggagtggtgagagttggcaaccttggcttgttccagttcttaaagagaatgctccccgtttttgcctgttcactacaatgttggctgtgggtttgtcatagatgtctcttattgttttgatatatgttccttcagtgcctagttttttgagaacttttaccaagaagggatgttggactatattgaaagcttttttgcatctattgagatgataatattgttkttgttcttaattctgtatatgtggtgaatcacatttgttgatttgcatatgttgaaccaaatttgtawcccaagamttaagcctacttggtcacggtgaatgaactttttgatgtgctgctggattcaatttgttagtattttgttgaggatttttgtatctatgtt

SEQ ID NO: 1528 - DNA, 401 bp, Homo sapiens
gttagtaacactgattagaaatgcagcagttttattcaggccttggttttattgaccatttttggttggctcttatctctgtgactgatcatgtatgcgtatttcaaatggataaataaactaaaaagtgtttaatactccaaaatgattagaagtgtattgttaaataccaaaaagaaaataattctggggtgtttcaggcatgttattctgttarcrtagttcacgttgagtgtttgtattcatttgttgtttgtttgtttgtaagtaacaggttttgactaaaattccacggactgtggaacarcacacactggggtctatcggagggtggaaagtgggtggagggagtgggtcaggaaaaataactaatgtatactaggcttaatacctgggtgata

SEQ ID NO: 1529 - DNA, 401 bp, Homo sapiens
ggagagagatagggaaggggaaatgctgtcaaaggatccaaagtttcagttagacagaaaaaataaacttcagtgatctattgcacagcatggtgaccacagttaaaaataatgtatggtacatctccaaattgcttaaaaaaaaaaaaaaggtttcaaatgttgtcaccacagaaaaacaaaaacaaaaacaaaaaaaaacaaaaaaaacgaggcaaggtgatggagwtgttaattagcttgatttaaccttcctacaatgtatatgtgttagtccgtttttgcgttgctgtaaagaagtatctgaggctaggtaatttgtaaagaaaagtggcttattttggctcatggttctgtagactataaaggtagcgtggtgctagcatctgcttttggtgagg

SEQ ID NO: 1530 - DNA, 401 bp, Homo sapiens
tcctcccatcaaagcttgggatctctgggaacagggaaacatatcaagatattagaagaygtcaatgttatatatgcagaaatggtgaaaaatcaatgaatttagtaagttaaatttgtttgggtagcattttaaaaatatttaagtactttgacatatgttaccccctaatacacagagggtgctcagacagcatttgcttacaggagtgaaccctggccaaagctgttttaaccaagggacagtggargcccagagaggttcgttggtttgcttaaaatcacacatccatgggtaagcaaggtgatggataatcagctcaattgagtcagtttacattgtatacacataacaaagcatcatgttgtgccctgtaaatgtatagaattatgatttgtcag

SEQ ID NO: 1531 - DNA, 401 bp, Homo sapiens
gattagaaaatcattatatccactttaagtgaaaagaaaaagtcttcatttttgtgttacttttccaaacctccttttggcactgaattgtactttatgggggtgtcttgtcatttttttctaaattaactacacctctgcttgcctggaaactagagccattctgacttctattccgatatgtgtktttcatctcctactttttttttttttgagacagtcttgctctgtcgcccaggctggagtgcagtggcacaatctcggctcactgcaacctccacctcccgggttccagcgattctcctgcctcagcctcccaagtagctgggactacaggcacgtgccaccacgccccactaatttttgtattttttaatagagatggggtttcaccatattgg

What is claimed is:

1. An isolated nucleic acid molecule comprising a neuregulin 1-associated gene 1, or a fragment or variant thereof.

2. The isolated nucleic acid molecule of claim 1, wherein the neuregulin 1-associated gene 1 has the nucleotide sequence of SEQ ID NO: 1.

3. A nucleic acid encoding a polypeptide having an amino acid sequence selected from the group consisting of SEQ ID NO: 6, SEQ ID NO: 7, SEQ ID NO: 8 and SEQ ID NO: 9.

4. An isolated nucleic acid molecule comprising a nucleotide sequence selected from the group consisting of SEQ ID NO: 1 and the complement of SEQ ID NO: 1.

5. An isolated nucleic acid molecule which hybridizes under high stringency conditions to a nucleotide sequence selected from the group consisting of SEQ ID NO: 1 and the complement of SEQ ID NO: 1.

6. An isolated nucleic acid molecule which hybridizes under high stringency conditions to a nucleotide sequence encoding an amino acid sequence selected from the group consisting of: SEQ ID NO: 6, SEQ ID NO: 7, SEQ ID NO: 8, and SEQ ID NO: 9.

7. A method for assaying the presence of a first nucleic acid molecule in a sample, comprising contacting said sample with a second nucleic acid molecule comprising a nucleotide sequence selected from the group consisting of SEQ ID NO: 1 and the complement of SEQ ID NO: 1, under high stringency conditions.

8. A vector comprising an isolated nucleic acid molecule selected from the group consisting of: SEQ ID NO: 1, the complement of SEQ ID NO: 1, a nucleic acid encoding SEQ ID NO: 6, a nucleic acid encoding SEQ ID NO: 7, a nucleic acid encoding SEQ ID NO: 8, and a nucleic acid encoding SEQ ID NO: 9, operatively linked to a regulatory sequence.

9. A recombinant host cell comprising the vector of claim 8.

10. A method for producing a polypeptide encoded by an isolated nucleic acid molecule, comprising culturing the recombinant host cell of claim 9 under conditions suitable for expression of said nucleic acid molecule.

11. An isolated polypeptide encoded by an neuregulin 1-associated gene 1, or a fragment or variant of said polypeptide.

12. The isolated polypeptide of claim 11, wherein the neuregulin 1-associated gene 1 has the sequence of SEQ ID NO: 1 or the complement of SEQ ID NO: 1.

13. The isolated polypeptide of claim 11, wherein the polypeptide has an amino acid sequence selected from the group consisting of SEQ ID NO: 6, SEQ ID NO: 7, SEQ ID NO: 8 and SEQ ID NO: 9.

14. An isolated polypeptide comprising an amino acid sequence which is greater than about 90 percent identical to an amino acid sequence selected from the group consisting of SEQ ID NO: 6, SEQ ID NO: 7, SEQ ID NO: 8 and SEQ ID NO: 9.

15. A fusion protein comprising an isolated polypeptide of claim 11.

16. An antibody, or an antigen-binding fragment thereof, which selectively binds to a polypeptide of claim 11.

17. An antibody, or an antigen-binding fragment thereof, which selectively binds to an amino acid sequence selected from the group consisting of SEQ ID NO: 6, SEQ ID NO: 7, SEQ ID NO: 8 and SEQ ID NO: 9, or to a fragment or variant of said amino acid sequence.

18. A method for assaying the presence of a polypeptide encoded by an isolated nucleic acid molecule according to claim 1 in a sample, comprising contacting said sample with an antibody which specifically binds to the encoded polypeptide.

19. A method of diagnosing a susceptibility to schizophrenia in an individual, comprising detecting a polymorphism in neuregulin 1-associated gene 1, wherein the presence of the polymorphism in the gene is indicative of a susceptibility to schizophrenia.

20. A method of diagnosing a susceptibility to schizophrenia, comprising detecting an alteration in the expression or composition of a polypeptide encoded by neuregulin 1-associated gene 1 in a test sample, in comparison with the expression or composition of a polypeptide encoded by neuregulin 1-associated gene 1 in a control sample, wherein the presence of an alteration in expression or composition of the polypeptide in the test sample is indicative of a susceptibility to schizophrenia.

21. The method of claim 20, wherein the alteration in the expression or composition of a polypeptide encoded by neuregulin 1-associated gene 1 comprises expression of a splicing variant polypeptide in a test sample that differs from a splicing variant polypeptide expressed in a control sample.

22. A method of identifying an agent which alters activity of a polypeptide of claim 11, comprising:
a) contacting the polypeptide or a derivative or fragment thereof, with an agent to be tested;
b) assessing the level of activity of the polypeptide or derivative or fragment thereof; and
c) comparing the level of activity with a level of activity of the polypeptide or active derivative or fragment thereof in the absence of the agent,
wherein if the level of activity of the polypeptide or derivative or fragment thereof in the presence of the agent differs, by an amount that is statistically significant, from the level in the absence of the agent, then the agent is an agent that alters activity of the polypeptide.

23. An agent which alters activity of a polypeptide encoded by neuregulin 1-associated gene 1, identifiable according to the method of claim 22.

24. An agent which alters activity of a polypeptide encoded by neuregulin 1-associated gene 1, wherein the agent is selected from the group consisting of: a neuregulin 1-associated gene 1 receptor; a neuregulin 1-associated gene 1 binding agent; a peptidomimetic; a fusion protein; a prodrug; an antibody; and a ribozyme.

25. A method of altering activity of a polypeptide encoded by neuregulin 1-associated gene 1, comprising contacting the polypeptide with an agent of claim 24.

26. A method of identifying an agent which alters interaction of the polypeptide of claim 11 with a neuregulin 1-associated gene 1 binding agent, comprising:
a) contacting the polypeptide or a derivative or fragment thereof, the binding agent and with an agent to be tested;
b) assessing the interaction of the polypeptide or derivative or fragment thereof with the binding agent; and
c) comparing the level of interaction with a level of interaction of the polypeptide or derivative or fragment thereof with the binding agent in the absence of the agent,
wherein if the level of interaction of the polypeptide or derivative or fragment thereof in the presence of the agent differs, by an amount that is statistically significant, from the level of interaction in the absence of the agent, then the agent is an agent that alters interaction of the polypeptide with the binding agent.

27. An agent which alters interaction of a neuregulin 1-associated gene 1 polypeptide with a neuregulin 1-associated gene 1 binding agent, identifiable according to the method of claim 26.

28. An agent which alters interaction of a neuregulin 1-associated gene 1 polypeptide with a first neuregulin 1-associated gene 1 binding agent, selected from the group consisting of: a neuregulin 1-associated gene 1 receptor; a second neuregulin 1-associated gene 1 binding agent; a peptidomimetic; a fusion protein; a prodrug; an antibody; and a ribozyme.

29. A method of altering interaction of a neuregulin 1-associated gene 1 polypeptide with a neuregulin 1-associated gene 1 binding agent, comprising contacting the neuregulin 1-associated gene 1 polypeptide and/or the neuregulin 1-associated gene 1 binding agent with an agent of claim 28.

30. A method of identifying an agent which alters expression of neuregulin 1-associated gene 1, comprising the steps of:
a) contacting a solution containing a nucleic acid of claim 1 or a derivative or fragment thereof with an agent to be tested;
b) assessing the level of expression of the nucleic acid, derivative or fragment; and
C) comparing the level of expression with a level of expression of the nucleic acid, derivative or fragment in the absence of the agent,
wherein if the level of expression of the nucleotide, derivative or fragment in the presence of the agent differs, by an amount that is statistically significant, from the expression in the absence of the agent, then the agent is an agent that alters expression of neuregulin 1-associated gene 1.

31. An agent which alters expression of neuregulin 1-associated gene 1, identifiable according to the method of claim 30.

32. A method of identifying an agent which alters expression of neuregulin 1-associated gene 1, comprising the steps of:
a) contacting a solution containing a nucleic acid comprising the promoter region of neuregulin 1-associated gene 1 operably linked to a reporter gene, with an agent to be tested;
b) assessing the level of expression of the reporter gene; and
c) comparing the level of expression with a level of expression of the reporter gene in the absence of the agent,
wherein if the level of expression of the reporter gene in the presence of the agent differs, by an amount that is statistically significant, from the level of expression in the absence of the agent, then the agent is an agent that alters expression of neuregulin 1-associated gene 1.

33. An agent which alters expression of neuregulin 1-associated gene 1, identifiable according to the method of claim 32.

34. A method of identifying an agent which alters expression of neuregulin 1-associated gene 1, comprising the steps of:
a) contacting a solution containing a nucleic acid of claim 1 or a derivative or fragment thereof with an agent to be tested;
b) assessing expression of the nucleic acid, derivative or fragment; and
c) comparing expression with expression of the nucleic acid, derivative or fragment in the absence of the agent,
wherein if expression of the nucleotide, derivative or fragment in the presence of the agent differs, by an amount that is statistically significant, from the expression in the absence of the agent, then the agent is an agent that alters expression of neuregulin 1-associated gene 1.

35. The method of claim 34, wherein the expression of the nucleotide, derivative or fragment in the presence of the agent comprises expression of one or more splicing variant(s) that differ in kind or in quantity from the expression of one or more splicing variant(s) the absence of the agent.

36. An agent which alters expression of neuregulin 1-associated gene 1, identifiable according to the method of claim 34.

37. An agent which alters expression of neuregulin 1-associated gene 1, selected from the group consisting of: antisense nucleic acid to neuregulin 1-associated gene 1; a neuregulin 1-associated gene 1 polypeptide; a neuregulin 1-associated gene 1 receptor; a neuregulin 1-associated gene 1 binding agent; a peptidomimetic; a fusion protein; a prodrug thereof, an antibody; and a ribozyme.

38. A method of altering expression of neuregulin 1-associated gene 1, comprising contacting a cell containing neuregulin 1-associated gene 1 with an agent of claim 37.

39. A method of identifying a polypeptide which interacts with a neuregulin 1-associated gene 1 polypeptide, comprising employing a two yeast hybrid system using a first vector which comprises a nucleic acid encoding a DNA binding domain and a neuregulin 1-associated gene 1 polypeptide, splicing variant, or fragment or derivative thereof, and a second vector which comprises a nucleic acid encoding a transcription activation domain and a nucleic acid encoding a test polypeptide, wherein if transcriptional activation occurs in the two yeast hybrid system, the test polypeptide is a polypeptide which interacts with a neuregulin 1-associated gene polypeptide.

40. A neuregulin 1-associated gene 1 therapeutic agent selected from the group consisting of: a neuregulin 1-associated gene 1 or fragment or derivative thereof; a polypeptide encoded by neuregulin 1-associated gene 1 ;a neuregulin 1-associated gene 1 receptor; a neuregulin 1-associated gene 1 binding agent; a peptidomimetic; a fusion protein; a prodrug; an antibody; an agent that alters neuregulin 1-associated gene 1 expression; an agent that alters activity of a polypeptide encoded by neuregulin 1-associated gene 1; an agent that alters posttranscriptional processing of a polypeptide encoded by neuregulin 1-associated gene 1; an agent that alters interaction of a neuregulin 1-associated gene 1 with a neuregulin 1-associated gene 1 binding agent; an agent that alters transcription of splicing variants encoded by neuregulin 1-associated gene 1; and a ribozyme.

41. A pharmaceutical composition comprising a neuregulin 1-associated gene 1 therapeutic agent of claim 40.

42. The pharmaceutical composition of claim 41, wherein the neuregulin 1-associated gene 1 therapeutic agent is an isolated nucleic acid molecule comprising a neuregulin 1-associated gene 1 or fragment or derivative thereof.

43. The pharmaceutical composition of claim 41, wherein the neuregulin 1-associated gene 1 therapeutic agent is a polypeptide encoded by the neuregulin 1-associated gene 1.

44. A method of treating schizophrenia in an individual, comprising administering a neuregulin 1-associated gene 1 therapeutic agent to the individual, in a therapeutically effective amount.

45. The method of claim 44, wherein the neuregulin 1-associated gene 1 therapeutic agent is a neuregulin 1-associated gene 1 agonist.

46. The method of claim 45 wherein the neuregulin 1-associated gene 1 therapeutic agent is a neuregulin 1-associated gene 1 antagonist.

47. A transgenic animal comprising a nucleic acid selected from the group consisting of: an exogenous neuregulin 1-associated gene 1 and a nucleic acid encoding a neuregulin 1-associated gene 1 polypeptide.

48. A method for assaying a sample for the presence of a neuregulin 1-associated gene 1 nucleic acid, comprising:
a) contacting said sample with a nucleic acid comprising a contiguous nucleotide sequence which is at least partially complementary to a part of the sequence of said neuregulin 1-associated gene 1 nucleic acid under conditions appropriate for hybridization, and
b) assessing whether hybridization has occurred between a neuregulin 1-associated gene 1 nucleic acid and said nucleic acid comprising a contiguous nucleotide sequence which is at least partially complementary to a part of the sequence of said neuregulin 1-associated gene 1 nucleic acid.

49. The method of claim 48, wherein said nucleic acid comprising a contiguous nucleotide sequence is completely complementary to a part of the sequence of said neuregulin 1-associated gene 1 nucleic acid.

50. The method of claim 48, comprising amplification of at least part of said neuregulin 1-associated gene 1 nucleic acid.

51. The method of claim 48, wherein said contiguous nucleotide sequence is 100 or fewer nucleotides in length and is either: a) at least 80% identical to a contiguous sequence of nucleotides in SEQ ID NO: 1; b) at least 80% identical to the complement of a contiguous sequence of nucleotides in SEQ ID NO: 1; or c) capable of selectively hybridizing to said neuregulin 1-associated gene 1 nucleic acid.

52. A reagent for assaying a sample for the presence of a neuregulin 1-associated gene 1 nucleic acid, said reagent comprising a nucleic acid comprising a contiguous nucleotide sequence which is at least partially complementary to a part of the nucleotide sequence of said neuregulin 1-associated gene 1 nucleic acid.

53. The reagent of claim 52, wherein the nucleic acid comprises a contiguous nucleotide sequence which is completely complementary to a part of the nucleotide sequence of said neuregulin 1-associated gene 1 nucleic acid.

54. A reagent kit for assaying a sample for the presence of a neuregulin 1-associated gene 1 nucleic acid, comprising in separate containers:
a) one or more labeled nucleic acids comprising a contiguous nucleotide sequence which is at least partially complementary to a part of the nucleotide sequence of said neuregulin 1-associated gene 1 nucleic acid, and
b) reagents for detection of said label.

55. The reagent kit of claim 54, wherein the labeled nucleic acid comprises a contiguous nucleotide sequences which is completely complementary to a part of the nucleotide sequence of said neuregulin 1-associated gene 1 nucleic acid.

56. A reagent kit for assaying a sample for the presence of a neuregulin 1-associated gene 1 nucleic acid, comprising one or more nucleic acids comprising a contiguous nucleotide sequence which is at least partially complementary to a part of the nucleotide sequence of said neuregulin 1-associated gene 1 nucleic acid, and which is capable of acting as a primer for said neuregulin 1-associated gene 1 nucleic acid when maintained under conditions for primer extension.

57. The use of a nucleic acid which is 100 or fewer nucleotides in length and which is either: a) at least 80% identical to a contiguous sequence of nucleotides in SEQ ID NO: 1; b) at least 80% identical to the complement of a contiguous sequence of nucleotides in SEQ ID NO: 1; or c) capable of selectively hybridizing to said neuregulin 1-associated gene 1 nucleic acid, for assaying a sample for the presence of a neuregulin 1-associated gene 1 nucleic acid.

58. The use of a nucleic acid which is 100 or fewer nucleotides in length and which is either: a) at least 80% identical to a contiguous sequence of nucleotides in SEQ ID NO: 1; b) at least 80% identical to the complement of a contiguous sequence of nucleotides in SEQ ID NO: 1; or c) capable of selectively hybridizing to said neuregulin 1-associated gene 1 nucleic acid, for assaying a sample for the presence of a neuregulin 1-associated gene 1 nucleic acid that has at least one nucleotide difference from SEQ ID NO: 1.

59. The use of a nucleic acid which is 100 or fewer nucleotides in length and which is either: a) at least 80% identical to a contiguous sequence of nucleotides in SEQ ID NO: 1; b) at least 80% identical to the complement of a contiguous sequence of nucleotides in SEQ ID NO: 1; or c) capable of selectively hybridizing to said neuregulin 1-associated gene 1 nucleic acid, for diagnosing a susceptibility to schizophrenia.
